United States Patent Application Publication US 2007/0224201 A1 - sequence listing, part 4

SEQ ID NO: 5354 - DNA, 2677 bp, Homo sapiens
gacatgtctgctagccaaggagcaccacgagtggccagcagccaccagagctgggagagaggcctgggacggccttgccctccagcctccagctggagccagccctgccgccaccttgacttcagacttacggcctccagagctgtgaggaacgaatccctgttgtccttaactgcccgggctgtggtgctttgccacagcagctccaggacattgagacaggtgacctcccagggccactgtttctcccaccctgcacttacttcaccagctggagtgaaggcagggaaccctgggtcccccaggagcagcagctgctgtgagcatcacagaaaagcagccccggagagcaggcggtccaggcaggggcttgtggtccgttcatctggctgcacagccgcgacctcattggcaggacgccccggggacaaggagcatccattagtaattggttttggttttgattttgttttcttgagatacggtcttgctctgtcgttcagcctggcatacagtggcacaatcttggcttactgcagccttgatctcccaggctcaagtgatcatcccacctcagcctcccgaatagctgggactacaggcacgcatcaccatgcctggctaatttgtatattttttagagatggggttttgcctggccgggcgcagtggctcacacctgtaatcccaaagcgctggggttacaggtgtgagccacagtacccggccccattggtaattgtaacaccttaggatgacaacattacagtaccaacgctacgacaactggcagtgtttatacacccttgtgtgctggagcctcaggaagctttgtaagatggtcttgggagctccttgctcctcccctgcatgatccctgtaacatggtccctcagcacggggaaacagactcagacctgaagtcacttgtctgttggacctggcactgtggcgagccctcagtggagcctggttggtatcagacatgccatgccctcagtgacacctcagacacgggccctgggcagacagcccccagatgcgcgtggatgcttacggggtcacagagccacgtttgaacccagaagaacaccagctttggtctagggtggccccctcacctgccttctctttttagctgctcaatagccatggggaatggagggtctgggtccagttagggacatggaggcatgggtgacctgtgccctcggagctgagccggtcctcagccttgcctgggctcaagcctggccctggcccgcagcacactggccatcttcagggtgcagccagcaccctgggctctcagggactgagggcagctgccctggcagtgggggtgccccagggctcccatccttctgcacggcccctcggcacccaggccgacctcctgctagaagacgtggccttgaagcccacagggttgatgggttatggtcaggagtcccagctgggcccaccagcctcctcaggaaggcgggtgaggttggtgtgagactgacggtgcctcctcatgtccccttggagcgccccaccccacatctcccggcctcgggtccttgcctggcccagcatgagaggtgcttcataggaacggagggaggacatgtcgggacagctcgatgctcggcctgctgctgctctgcacccccagggcctggctcaccctctctggacctgtctgcttccaaggaaggggaccctctgaggtcccacagaggccaccccagctgtgggtcgtgagcatctctgtcttgcagggacagcatcgtggccgagctggaccgagagatgagcaggagcgtggacgtgaccaacaccaccttcctgctcatggccgcctccatctatctccacgaccagaacccggatgccgccctgcgtgcgctgcaccagggggacagcctggagtggtgagtggcctccctgctctggggccagcccagggaggcaagtgccccctgccacatctccaggctgcgcacggcctcgctggctgtcgtcatgggagcagagaaaggtggtgctgaaatgaggccctggcctgctgtccaggctccagctcccctgcccagtgtgggaggcactcccatctgcgcaccaggctgcagatccaaggacacggtgcccaggctgcaaccctctgttcccaagggcagagcagaaagcggctttgtctctgctcggtttctgtgtccccaccccccacgaagccttctgtgtctcggccctgggcccagtctctcaggcctccccgggccccccataccggccctcctccagggccctctggggttggggtgctgaagccctgcaaggttggtgcccccctccaccctaggatgtgactccgggccatgtccagggcactggtcacagaaagtgtgtcagttcttccccgtgagctgtccctgcagtgcctgccttccactgtgagttgcaagctgggcatttcatggtcgctgtggatctgctcccatcccacctccatccacagagggcttagaattgcagggcgagccaggcatggtgacatgcacctatgtttccagctacttgggaggcggaagcaggagtatcccttgagtctgggaggtggaggctgcagtgagccgtgatggtgccactgcactccagcctgggtggcagagccagaccctgactcacacac

SEQ ID NO: 5355 - DNA, 2319 bp, Homo sapiens
gcaaaacatttccctgctgggggcggcgaccaccgtgagcgtcccggaaggggcggcaaagacgcctccgtcgcgcacgaggtggcctcgttggctttaccttggttcgcggtcgtccttggttatcgtgagcgtccgcgagtctctgggaggccaagcctaggggcgccacagcgcctgcgcgcgtacggcggccggaaggggctagaggcggctccctgggtgacaaccgcgcgccccacctttccccacgtggccgcgaagaccggctcaggagcatctatcggctgcacgccaacatcaacacaggcgaagatggtctccaagcgcattgcccaggagacctttgatgcagctgtgcgcgagaacatcgaggagtttgcgatggggccagaggaggcagtgaaagaggccgtggagcagtttgaatcgcaaggggttgatctgagcaacattgtaaagacggcacctaaagtctctgcagacggatcccaggagcccacacatgacatcctgcagatgctcagtgacctccaggagtctgtggccagctctcgcccccaggaggtgtcagcatacctcacccgcttctgcgaccagtgcaaacaggacaaggcctgccgcttcctcgcggcccagaagggggcctaccccatcatcttcactgcctggaagctggccactgcaggtgaccagggccttctgctccagtccctcaatgccctgtcggtgctgactgatggacagccagacctcctggatgcccagggcctgcagctcctagtggccacgctgacccagaatgctgatgaggctgacctgacctgctctgggatccgctgtgtgcgtcacgcttgcctgaaacatgaacagaatcggcaagacctggtgaaagctggcgtgctgcctctgctgactggtgccatcacccatcatggccaccacactgacgtggtcagggaagcctgctgggccctgcgtgtcatgaccttcgatgacgacatccgtgtgccctttggccatgcccacaaccatgccaagatgattgtgcaggagaacaaaggcttgaaggtgctcatcgaagccaccaaagcgttcctggataaccctggcatcctgagcgagctctgtggaaccctgtcccgcctggccattcgcaacgagttctgccaggaggtcgtcgacctcgggggcctgagcattctggtgtccctgctagccgactgcaatgaccaccagatgagggaccagagcggcgttcaggagctcgtgaagcaagtgctgagcaccctgcgagccatcgcaggcaacgacgacgtgaaagatgctattgtccgtgctggtgggacggagtccatcgtggctgctatgacccagcatctgaccagcccccaggtgtgtgagcagagctgcgcggccctgtgcttcctggccctgcgtaagcccgacaacagccgcatcatcgtggagggtggcggggctgtggcagcactgcaggccatgaaggcacacccgcagaaggccggcgtgcagaaacaggcttgcatgctgatccgaaacctggtggcccacggccaggccttctcgaagcccatcctggacctgggggctgaggcactcatcatgcaggcccgatctgcccaccgtgactgtgaggacgtggccaaggccgccctgcgggacctgggttgtcatgtcgagctccgagagctgtggacaggccagaggggcaacctggcgccatgaccccaggcccagtctgggccgtgactctgggtgagtcgtgtgactcaggaatgggggtagatccatgtcctccactgtcccccattagttctgtccccttcacaatgagaagtgttttctggcaggccctaggtaaagggtcgggggaggggggagccttgtagggaggcctctacacagaagaaagcagcccccatgtcccagccacttctgggtcccagccagcagcacggatgttactgtcctgctccttcccccagccccacgccctaccagagggggcaaagggcacgtcccatcactcactgccctgtctgaaatgtggcagccactgtgggccaggctcagggcagggcaggcgattccagtggggttgggccccctggcgcctgctgcttactgcagtttcatgcaggcctctgctccttgtctttcttacctgtaaaatgggtctcagatgctccgccctgcttggccccagcttgtctgtctctgggtcctgggccagccaggatacctgataataaaagatcattgggtgaaaaaaaaaaaaaaaaaaaaaaaaaaaaaaaa

SEQ ID NO: 5356 - protein, 476 aa, Homo sapiens
MVSKRIAQETFDAAVRENIEEFAMGPEEAVKEAVEQFESQGVDLSNIVKTAPKVSADGSQEPTHDILQMLSDLQESVASSRPQEVSAYLTRFCDQCKQDKACRFLAAQKGAYPIIFTAWKLATAGDQGLLLQSLNALSVLTDGQPDLLDAQGLQLLVATLTQNADEADLTCSGIRCVRHACLKHEQNRQDLVKAGVLPLLTGAITHHGHHTDVVREACWALRVMTFDDDIRVPFGHAHNHAKMIVQENKGLKVLIEATKAFLDNPGILSELCGTLSRLAIRNEFCQEVVDLGGLSILVSLLADCNDHQMRDQSGVQELVKQVLSTLRAIAGNDDVKDAIVRAGGTESIVAAMTQHLTSPQVCEQSCAALCFLALRKPDNSRIIVEGGGAVAALQAMKAHPQKAGVQKQACMLIRNLVAHGQAFSKPILDLGAEALIMQARSAHRDCEDVAKAALRDLGCHVELRELWTGQRGNLAP

SEQ ID NO: 5357 - DNA, 1785 bp, Homo sapiens
ggccggtgggtgagtgcaccgcgttctcgcacgcgtcatggcggtcctcggagtacagctggtggtgaccctgctcactgccaccctcatgcacaggctggcgccacactgctccttcgcgcgctggctgctctgtaacggcagtttgttccgatacaagcacccgtctgaggaggagcttcgggccctggcggggaagccgaggcccagaggcaggaaagagcggtgggccaatggccttagtgaggagaagccactgtctgtgccccgagatgccccgttccagctggagacctgccccctcacgaccgtggatgccctggtcctgcgcttcttcctggagtaccagtggtttgtggactttgctgtgtactcgggcggcgtgtacctcttcacagaggcctactactacatgctgggaccagccaaggagactaacattgctgtgttctggtgcctgctcacggtgaccttctccatcaagatgttcctgacagtgacacggctgtacttcagcgccgaggaggggggtgagcgctctgtctgcctcacctttgccttcctcttcctgctgctggccatgctggtgcaagtggtgcgggaggagaccctcgagctgggcctggagcctggtctggccagcatgacccagaacttagagccacttctgaagaagcagggctgggactgggcgcttcctgtggccaagctggctatccgcgtgggactggcagtggtgggctctgtgctgggtgccttcctcaccttcccaggcctgcggctggcccagacccaccgggacgcactgaccatgtcggaggacagacccatgctgcagttcctcctgcacaccagcttcctgtctcccctgttcatcctgtggctctggacaaagcccattgcacgggacttcctgcaccagccgccgtttggggagacgcgtttctccctgctgtccgattctgccttcgactctgggcgcctctggttgctggtggtgctgtgcctgctgcggctggcggtgacccggccccacctgcaggcctacctgtgcctggccaaggcccgggtggagcagctgcgaagggaggctggccgcatcgaagcccgtgaaatccagcagagggtggtccgagtctactgctatgtgaccgtggtgagcttgcagtacctgacgccgctcatcctcaccctcaactgcacacttctgctcaagacgctgggaggctattcctggggcctgggcccagctcctctactatcccccgacccatcctcagccagcgctgcccccatcggctctggggaggacgaagtccagcagactgcagcgcggattgccggggctctgggtggcctgcttactcccctcttcctccgtggcgtcctggcctacctcatctggtggacggctgcctgccagctgctcgccagccttttcggcctctacttccaccagcacttggcaggctcctagctgcctgcagaccctcctggggccctgaggtctgttcctggggcagcgggacactagcctgccccctctgtttgcgcccccgtgtccccagctgcaaggtggggccggactccccggcgttcccttcaccacagtgcctgacccgcggccccccttggacgccgagtttctgcctcagaactgtctctcctgggcccagcagcatgagggtcccgaggccattgtctccgaagcgtatgtgccaggtttgagtggcaagggtgatgctggctgctcttctgaacaaataaaggagcatgccgattttt

SEQ ID NO: 5358 - DNA, 1369 bp, Homo sapiens
ccggacgccgcacggctcctgttccggtgtcagagggcccgccctccccgctcctcagtctttgcggacaagaaaggggctgtgtgagacgcagggaaggaggcacacccgggggtggcgcagtgaggagggggcgcgacggccaggaggctggtggagcgacacccaggcaggagagggggaagaactctctccctttctgaacccccttttccttgagagacgagttgggggagtcctccacgcattacccactcgggccgcaaaaactcccttctttagccctctgcccccgcccttgcttataagcctttgagaccgcagaagggaccttgttgtggaacgggacggccaagaggaagccagatcgctgagggtccggtctccagtttgcctcctgctatatccattggaagagaaaagtttgtgacttgggcccccaagttttgagagaactgggctttcggcgcggggggacagaggaggctcgtggggagctttccccatggagcttacccagcctgcagaagacctcatccagacccagcagacccctgcctcagaacttggggaccctgaagaccccggagaggaggctgcagatggctcagacactgtggtcctcagtctctttccctgcacccctgagcctgtgaatcctgaaccggatgccagtgtttcctctccacagggcagctccctgaagcactccaccactctcaccaaccggcagcgagggaacgaggtgtcagctctgccggccaccctagactgtgacaacctcgtcaacaagccagacgagcgcggcttcacccccctcatctgggcctccgcctttggagagattgagaccgttcgcttcctgctggagtggggtgccgacccccacatcctggcaaaagagcgagagagcgccctgtcgctggccagcacaggcggctacacagacattgtggggctgctgctggagcgtgacgtggacatcaacatctatgattggaatggagggacgccactgctgtacgctgtgcgcgggaaccacgtgaaatgcgttgaggccttgctggcccgaggcgctgacctcaccaccgaagccgactctggctacaccccgatggaccttgccgtggccctgggataccggaaagtgcaacaggtgatcgagaaccacatcctcaagctcttccagagcaacctggtgcccgctgaccctgagtgaaggccgcctgccggggactcagacactcagggaacaaaatggtcagccagagctggggaaacccagaactgacttcaaaggcagcttctggacaggtggtgggaggggacccttcccaagaggaaccaataaaccttctgtgcagaatga

SEQ ID NO: 5359 - protein, 237 aa, Homo sapiens
MELTQPAEDLIQTQQTPASELGDPEDPGEEAADGSDTVVLSLFPCTPEPVNPEPDASVSSPQGSSLKHSTTLTNRQRGNEVSALPATLDCDNLVNKPDERGFTPLIWASAFGEIETVRFLLEWGADPHILAKERESALSLASTGGYTDIVGLLLERDVDINIYDWNGGTPLLYAVRGNHVKCVEALLARGADLTTEADSGYTPMDLAVALGYRKVQQVIENHILKLFQSNLVPADPE

SEQ ID NO: 5360 - DNA, 1438 bp, Homo sapiens
ccggacgccgcacggctcctgttccggtgtcagagggcccgccctccccgctcctcagtctttgcggacaagaaaggggctgtgtgagacgcagggaaggaggcacacccgggggtggcgcagtgaggagggggcgcgacggccaggaggctggtggagcgacacccaggcaggagagggggaagaactctctccctttctgaacccccttttccttgagagacgagttgggggagtcctccacgcattacccactcgggccgcaaaaactcccttctttagccctctgcccccgcccttgcttataagcctttgagaccgcagaagggaccttgttgtggaacgggacggccaagaggaagccagatcgctgagggtccggtctccagtttgcctcctgctatatccattggaagagaaaagtttgtgacttgggcccccaagttttgagagaactgggctttcggcgcggggggacagaggaggctcgtggggagctttccccatggagcttacccagcctgcagaagacctcatccagacccagcagacccctgcctcagaacttggggaccctgaagaccccggagaggaggctgcagatggctcagacactgtggtcctcagtctctttccctgcacccctgagcctgtgaatcctgaaccggatgccagtgtttcctctccacaggcaggcagctccctgaagcactccaccactctcaccaaccggcagcgagggaacgaggtgtcagctctgccggccaccctagactccctgtccatccaccagctcgcagcacagggggagctggaccagctgaaggagcatttgcggaaaggtgacaacctcgtcaacaagccagacgagcgcggcttcacccccctcatctgggcctccgcctttggagagattgagaccgttcgcttcctgctggagtggggtgccgacccccacatcctggcaaaagagcgagagagcgccctgtcgctggccagcacaggcggctacacagacattgtggggctgctgctggagcgtgacgtggacatcaacatctatgattggaatggagggacgccactgctgtacgctgtgcgcgggaaccacgtgaaatgcgttgaggccttgctggcccgaggcgctgacctcaccaccgaagccgactctggctacaccccgatggaccttgccgtggccctgggataccggaaagtgcaacaggtgatcgagaaccacatcctcaagctcttccagagcaacctggtgcccgctgaccctgagtgaaggccgcctgccggggactcagacactcagggaacaaaatggtcagccagagctggggaaacccagaactgacttcaaaggcagcttctggacaggtggtgggaggggacccttcccaagaggaaccaataaaccttctgtgcagaatga

SEQ ID NO: 5361 - protein, 260 aa, Homo sapiens
MELTQPAEDLIQTQQTPASELGDPEDPGEEAADGSDTVVLSLFPCTPEPVNPEPDASVSSPQAGSSLKHSTTLTNRQRGNEVSALPATLDSLSIHQLAAQGELDQLKEHLRKGDNLVNKPDERGFTPLIWASAFGEIETVRFLLEWGADPHILAKERESALSLASTGGYTDIVGLLLERDVDINIYDWNGGTPLLYAVRGNHVKCVEALLARGADLTTEADSGYTPMDLAVALGYRKVQQVIENHILKLFQSNLVPADPE

SEQ ID NO: 5362 - DNA, 1023 bp, Homo sapiens
ggtccgacattcgtagcagcagctgccccccaagcatcagtgtacccagcccagtgactgacgtggagccctgggcttcgcgtagagtcacctagacggggcgaaaacgggaaaaggggccttaactggggcacctggctcctttgagagctcggagtttctgactggactgcgcaacaccccagaggcaaggtgaacgcgagggcctataatgcaagaaccaaggcgagtcacgcactgtctgggcaaaagaggagtaaagacccctcagctgcagcccggcagcgcattcctacccagggtccgccgccagagctttaccgcgcggtcggatagttacactactgtccgggacttcctagccgtgccgcggaccatctcaagtgcttccgccacactcatcatggcggtggcagtaagtcacttccgcccgggaccggaagtgtgggatactgcgagtatggcggcgtcaaaggtgaagcaggacatgcctccgccggggggctatgggcccatcgactacaaacggaacttgccgcgtcgaggactgtcgggctacagcatgctggccatagggattggaaccctgatctacgggcactggagcataatgaagtggaaccgtgagcgcaggcgcctacaaatcgaggacttcgaggctcgcatcgcgctgttgccactgttacaggcagaaaccgaccggaggaccttgcagatgcttcgggagaacctggaggaggaggccatcatcatgaaggacgtgcccgactggaaggtgggggagtctgtgttccacacaacccgctgggtgccccccttgatcggggagctgtacgggctgcgcaccacagaggaggctctccatgccagccacggcttcatgtggtacacgtaggccctgtgccctccggccacctggatccctgcccctccccactgggacggaataaatgctctgcagacctggaaaaaaaaaaaaaaaaaaaaaaaaaaaaaaaaaaaaaaaaaaaaaaaaaaaaaaaa

SEQ ID NO: 5363 - protein, 227 aa, Homo sapiens
MQEPRRVTHCLGKRGVKTPQLQPGSAFLPRVRRQSFTARSDSYTTVRDFLAVPRTISSASATLIMAVAVSHFRPGPEVWDTASMAASKVKQDMPPPGGYGPIDYKRNLPRRGLSGYSMLAIGIGTLIYGHWSIMKWNRERRRLQIEDFEARIALLPLLQAETDRRTLQMLRENLEEEAIIMKDVPDWKVGESVFHTTRWVPPLIGELYGLRTTEEALHASHGFMWYT

SEQ ID NO: 5364 - DNA, 1131 bp, Homo sapiens
gcccctccccgccccgcctcccggcgcgggtggccgaggcgtagcgctgcgacccccgcacccctgctaacatggcgctgcgagtggtgcggagcgtgcgggctctgctctgcaccctgcgcgcggtcccgtcacccgccgcgccctgcccgccgaggccctggcagctgggggtgggcgccgtccgtacgctgcgcactggacccgctctgctctcggtgcgtaaattcacagagaaacacgaatgggtaacaacagaaaatggcattggaacagtgggaatcagcaattttgcacaggaagcgttgggagatgttgtttactgtagtctgcctgaagttgggacaaaattgaacaaacaagatgagtttggtgctttggaaagtgtgaaagctgctagtgaactctattctcctttatcaggagaagtaactgaaattaatgaagctcttgcagaaaatccaggactcgtaaacaaatcttgttgtgaagatggttggctgatcaagatgacactgagtaacccttcagaactagatgaacttatgagtgaagaagcatatgagaaatacataaaatctattgaggagtgaaaatggaactcctaaataaactagtatgaaataacgcaagccagcagagttgtcttaaattagtggtggatagaagacttagaatagaaacttttaatattaccgatgggggaaaaaaactactgttaacactgctaatgaaagaaaatgcctttaactttctaatgattatagataaatataatatgcatctttttcacaatatcctatgatttttagactaggctctagtgttcagaattcatgaaattatccatggtaaaaactagttataaaaattacataattcaaagataacattgttattcttaagccttatataatattgtaacttgcatgtatccatacctggatttgggatgaaatacttaatgatctttccattggaaataactggaagtgaagaggttttgttgcttgtacagtgtcagatgaggaacaccactattttaattttgcgatacactgcatttgctggtgctatttttatacagtgaagcaacagctttgcagcaaaataataaaatacttctttgtt

SEQ ID NO: 5365 - protein, 173 aa, Homo sapiens
MALRVVRSVRALLCTLRAVPSPAAPCPPRPWQLGVGAVRTLRTGPALLSVRKFTEKHEWVTTENGIGTVGISNFAQEALGDVVYCSLPEVGTKLNKQDEFGALESVKAASELYSPLSGEVTEINEALAENPGLVNKSCCEDGWLIKMTLSNPSELDELMSEEAYEKYIKSIEE

SEQ ID NO: 5366 - DNA, 480 bp, Homo sapiens
tactgaccccagggctgaccaccagcctctcacggaggcatcttaatgtggtggatgctggctcgggaagttctgcgcatgcgtggcaccatttcccgtgaacacccatgggaggtcatgcctgatctgtacttctacagagatcctgaagagattgaaaaagaagagcaggctgctgctgagaaggcagtgaccaaggaggaatttcagggtgaatggactgctcccgctcctgagttcactgctactcagcctgaggttgcagactggtctgaaggtgtgcaggtgccctctgtgcctattcagcaattccctactgaagactggagcgctcagcctgccatggaagactggtctgcagctcccactgctcaggccactgaatgggtaggagcaaccactgactggtcttaagctgttcttgcataggctcttaagcagcatggaaaaatggttgatggaaaataaacatcagtttct

SEQ ID NO: 5367 - DNA, 1033 bp, Homo sapiens
gcttttccatgctacctgcagaggggtccatacggcgttgttctggattcccgtcgtaacttaaagggaaactttcacaatgtccggagcccttgatgtcctgcaaattaaggaggaggatgtccttaagttccttgcagcaggaacccacttaggtggcaccaatcttgacttccagatggaacagtacatctataaaaggaaaagtgatggcatctatatcataaatctcaagaggacctgggagaagcttctgctggcagctcgtgctattgttgccattgaaaaccctgctgatgtcagtgttatatcctccaggaatactggccagagggctgtgctgaagtttgctgctgccactggagccactccaattgctggccgcttcactcctggaaccttcactaaccagatccaggcagccttctgggagccacggcttcttgtggttactgaccccagggctgaccaccagcctctcacggaggcatcttatgttaacctacctaccattgcgctgtgtaacacagattctcctctgcgctatgtggacattgccatcccatgcaacaacaagggagctcactcagtgggtttgatgtggtggatgctggctcgggaagttctgcgcatgcgtggcaccatttcccgtgaacacccatgggaggtcatgcctgatctgtacttctacagagatcctgaagagattgaaaaagaagagcaggctgctgctgagaaggcagtgaccaaggaggaatttcagggtgaatggactgctcccgctcctgagttcactgctactcagcctgaggttgcagactggtctgaaggtgtgcaggtgccctctgtgcctattcagcaattccctactgaagactggagcgctcagcctgccatggaagactggtctgcagctcccactgctcaggccactgaatgggtaggagcaaccactgactggtcttaagctgttcttgcataggctcttaagcagcatggaaaaatggttgatggaaaataaacatcagtttct

SEQ ID NO: 5368 - protein, 295 aa, Homo sapiens
MSGALDVLQIKEEDVLKFLAAGTHLGGTNLDFQMEQYIYKRKSDGIYIINLKRTWEKLLLAARAIVAIENPADVSVISSRNTGQRAVLKFAAATGATPIAGRFTPGTFTNQIQAAFWEPRLLVVTDPRADHQPLTEASYVNLPTIALCNTDSPLCYVDIAIPCNNKGAHSVGLMWWMLAREVLRMRGTISREHPWEVMPDLYFYRDPEEIEKEEQAAAEKAVTKEEFQGEWTAPAPEFTATQPEVADWSEGVQVPSVPIQQFPTEDWSAQPAMEDWSAAPTAQATEWVGATTDWS

SEQ ID NO: 5369 - DNA, 340 bp, Homo sapiens
ctttccggtgatgacaaccttcccacaagaggacatgcctctcacaaaggatctccttcatccctctccagaagagaagaggaaacacaagaagaaacgcctggtgcagagccccaattcctacttcatggatgtgaaatgcccaggatgctataaagtcaccacggtctttagtcatgcacaaatggtagttttgtgtgttggctgctccactgtcctctgccagcctacaggaggaaaagcaaggcttacagaaggatgttccttcaggaggaagcagcactaaaagcactctgaatcaagatgagtgggaaaccatctcaataaacacattttggat

SEQ ID NO: 5370 - DNA, 1202 bp, Homo sapiens
gtcgtcacgcgtcccgcgcctcctcgcgcctgcgccgtggttggaaggtcgtccctgtgaccggcttggcggttggagcggctgtcgccatgttgtcggtagcatcccgctcaggcccgttcgcgcccgtcctgtcggccacgtcccgcggggtggcgggcgcgctgcggcccttggtgcaggccacggtgcccgccaccccggagcagcctgtgttggacctgaagcggcccttcctcagccgggagtcgctgagcggccaggccgtgcgccggcctttggtcgcctccgtgggcctcaatgtccctgcttctgtttgttattcccacacagacatcaaggtgcctgacttctctgaataccgccgccttgaagttttagatagtacgaagtcttcaagagaaagcagcgaggctaggaaaggtttctcctatttggtaactggagtaactactgtgggtgtcgcatatgctgccaagaatgccgtcacccagttcgtttccagcatgagtgcttctgctgatgtgttggccctggcgaaaatcgaaatcaagttatccgatattccagaaggcaagaacatggctttcaaatggagaggcaaacccctgtttgtgcgtcatagaacccagaaggaaattgagcaggaagctgcagttgaattatcacagttgagggacccacagcatgatctagatcgagtaaagaaacctgaatgggttatcctgataggtgtttgcactcatcttggctgtgtacccattgcaaatgcaggagattttggtggttattactgcccttgccatgggtcacactatgatgcatctggcaggatcagattgggtcctgctcctctcaaccttgaagtccccacgtatgagttcaccagtgacgatatggtgattgttggttaagagacttggactcaagtcataggcttctttcagtctttatgtcacctcaggagacttatttgagaggaagccttctgtacttgaagttgatttgaaatatgtaagaattgatgatgtatttgcaaacattaatgtgaaataaattgaatttaatgttgaatactttcaggcattcacttaataaagacactgttaagcactgttatgctcagtcatacacgcgaaaggtacaatgtcttttagctaattctaattaaaaattacagactggtgtacaagatacttgtg

SEQ ID NO: 5371 - DNA, 563 bp, Homo sapiens
actggagtaactactgtgggtgtcgcatatgctgccaagaatgccgtcacccagttcgtttccagcatgagtgcttctgctgatgtgttggccctggcgagaggcaaacccctgtttgtgcgtcatagaacccagaaggaaattgagcaggaagctgcagttgaattatcacagttgagggacccacagcatgatctagatcgagtaaagaaacctgaatgggttatcctgataggtgtttgcactcatcttggctgtgtacccattgcaaatgcaggagattttggtggttattactgcccttgccatgggtcacactatgatgcatctggcaggatcagattgggtcctgctcctctcaaccttgaagtccccacgtatgagttcaccagtgacgatatggtgattgttggttaagagacttggactcaagtcataggcttctttcagtctttatgtcacctcaggagacttatttgagaggaagccttctgtacttgaagttgatttgaaatatgtaagaattgatgatgtatttgcaaacattaatgtgaaataaattg

SEQ ID NO: 5372 - DNA, 2523 bp, Homo sapiens
gggcctgcgggagcgcggccttgcggttcccaggactcttctccgggcgcctcgtctccttacgccacccgcaacccaagccagggccccggtgacagcggcggggtgggccaggaccggggagggggtgcccagcagcgacccccggctccccctaaggccgggcgcagctcggagccaggagctggcccggcgcgtggcttcccggaaggcccggcgcagccggaaggtgggacggagggcggggccagcgccggggccgccaccaaggcctgcgcgaccctccgcggggctggggagctgggcggggagcccggggcctgccaggcccgggctgcagccgcgtctgatcgccgagcgcgccgcgtagacctccgctcccccagccaccgtctggatgctgtctgtcatacaggcgcttggagctgctgagctttcctgaaaagggggacccttccttaaaactctaggaactagagtggcattgtgatggaaatactcttatgctcattgaaactgtccctctgaacttctccctcgaaggcccgccacgatgactatcatggtggaggacatcatgaagctgctgtgctccctttctggggagaggaagatgaaggcggctgtcaagcactctgggaagggtgccctggtcacaggggccatggccttcgtcgggggtttggtgggcggcccaccgggactcgccgttgggggggctgtcggggggctgttaggtgcctggatgacaagtggacagtttaagccggttcctcagatcctaatggagctgccccctgccgagcaacagaggctctttaacgaagccgcagccatcatcaggcacctggagtggacggacgccgtgcagctgaccgcgctggtcatgggcagcgaggccctgcagcagcagctgctggccatgctggtgaactacgtcaccaaggagctgcgggccgagatccagtatgatgactaggccgcacctccggggaggtggggggcccctttaaatgactctgtgattctgaagaggtggcttgggagttgggagaagcccagcggatgccccctggggaatctccacatcatcagtgtattactagtaatgtcccgctggagaggccaccgctgtgcagtgtcatgttccagaaattactgatgaagcagcatgtgttggtggcatgtgcactggcctgccatgacagccctctgactggccccccagtgaagagtaaaggcctgcctgccgcaggcttcggaggcgtctgctgagtcctctcacccgcatgggtctggggaagtgatcacgctcagccgacggtctgaccacacttcatcctccccccggggccttctcatcttgggagatgactcctcttcagagcacctgctgcaggactggatcccacccccctgcaggtcctggggtctcagggccttggagcagcccatgctggaatcatgtttacctcctagtgcaaccgtcccctacccagggactgtcgaatggccccacggaggggacgggcggcctgctgagtgaagccacaaataccgagtggacttgaccccggcccccactaggctgcacacctagactcgccctgccagggcctcgctcttcccatctgaaaagtcctggtagttcttgaggtttacttctcaaatgaaatatttttagtaaaaagtacaggtatatctcggagatattgtgggttcagttccagaccacctcggtaaagccaacatcacaataaagcaaggaagcgcattgttttagtttcccagtgcatctaagtcatgtttactgcatattgcagtccactaaatgtgcaatagcattatgtctaacaaatgtacaaaccttaatttaaaaatatttactgttcaaaatgctgacacagaaacgcaaagtgagcacatgctgttggaaaatggtgccaaatagacttgcctgatgccaggctgctacaaaccttcaatttaaaaaaaaaacacagtattcacaaagcatagtagaatgaggtatgcctgtattgctctttctgaagtggtgtgatataaaccatctctaagaaatgtttctaccctaaagatttccccagtacagtcagctctccgtaactgtggtctccacatttagatccaaccagccttggataggaaatatttgaaaaaagaaattgcattggtactgaacacgtacagacctttttttcttgccattattccctaaacaatatggtgtagcatatttacatagcatttatattgtatttggtattataagaaatctagagatgatttaaattatacaggaaggtgtgcgtaggttacgtgcaaacgctatgccattgcccatcagggacttgagcatcctcagatgtcggtgtctgagggttgaggttgcagtcctggaacccatcccccatggatactgaggcatagctgtactgtgtgttttcactttgctttcagaactacgacttgaatgtgatcgattacaataaatgtttttct

SEQ ID NO: 5373 - protein, 141 aa, Homo sapiens
MTIMVEDIMKLLCSLSGERKMKAAVKHSGKGALVTGAMAFVGGLVGGPPGLAVGGAVGGLLGAWMTSGQFKPVPQILMELPPAEQQRLFNEAAAIIRHLEWTDAVQLTALVMGSEALQQQLLAMLVNYVTKELRAEIQYDD

SEQ ID NO: 5374 - DNA, 1958 bp, Homo sapiens
agcagccggcgcggccgccagcgcggtgtagggggcaggcgcggatcccgccaccgccgcgcgctcggcccgccgactcccggcgccgccgccgccactgccgtcgccgccgccgcctgccgggactggagcgcgccgtccgccgcggacaagaccctggcctcaggccggagcagccccatcatgccgagggagcgcagggagcgggatgcgaaggagcgggacaccatgaaggaggacggcggcgcggagttctcggctcgctccaggaagaggaaggcaaacgtgaccgtttttttgcaggatccagatgaagaaatggccaaaatcgacaggacggcgagggaccagtgtgggagccagccttgggacaataatgcagtctgtgcagacccctgctccctgatccccacacctgacaaagaagatgatgaccgggtttacccaaactcaacgtgcaagcctcggattattgcaccatccagaggctccccgctgcctgtactgagctgggcaaatagagaggaagtctggaaaatcatgttaaacaaggaaaagacatacttaagggatcagcactttcttgagcaacaccctcttctgcagccaaaaatgcgagcaattcttctggattggttaatggaggtgtgtgaagtctataaacttcacagggagaccttttacttggcacaagatttctttgaccggtatatggcgacacaagaaaatgttgtaaaaactcttttacagcttattgggatttcatctttatttattgcagccaaacttgaggaaatctatcctccaaagttgcaccagtttgcgtatgtgacagatggagcttgttcaggagatgaaattctcaccatggaattaatgattatgaaggcccttaagtggcgtttaagtcccctgactattgtgtcctggctgaatgtatacatgcaggttgcatatctaaatgacttacatgaagtgctactgccgcagtatccccagcaaatctttatacagattgcagagctgttggatctctgtgtcctggatgttgactgccttgaatttccttatggtatacttgctgcttcggccttgtatcatttctcgtcatctgaattgatgcaaaaggtttcagggtatcagtggtgcgacatagagaactgtgtcaagtggatggttccatttgccatggttataagggagacggggagctcaaaactgaagcacttcaggggcgtcgctgatgaagatgcacacaacatacagacccacagagacagcttggatttgctggacaaagcccgagcaaagaaagccatgttgtctgaacaaaatagggcttctcctctccccagtgggctcctcaccccgccacagagcggtaagaagcagagcagcgggccggaaatggcgtgaccaccccatccttctccaccaaagacagttgcgcgcctgctccacgttctcttctgtctgttgcagcggaggcgtgcgtttgcttttacagatatctgaatggaagagtgtttcttccacaacagaagtatttctgtggatggcatcaaacagggcaaagtgttttttattgaatgcttataggttttttttaaataagtgggtcaagtacaccagccacctccagacaccagtgcgtgctcccgatgctgctatggaaggtgctacttgacctaagggactcccacaacaacaaaagcttgaagctgtggagggccacggtggcgtggctctcctcgcaggtgttctgggctccgttgtaccaagtggagcaggtggttgcgggcaagcgttgtgcagagcccatagccagctgggcagggggctgccctctccacattatcagttgacagtgtacaatgcctttgatgaactgttttgtaagtgctgctatatctatccattttttaataaagataatactgtttttgagacaaaaaaaa

SEQ ID NO: 5375 - protein, 410 aa, Homo sapiens
MPRERRERDAKERDTMKEDGGAEFSARSRKRKANVTVFLQDPDEEMAKIDRTARDQCGSQPWDNNAVCADPCSLIPTPDKEDDDRVYPNSTCKPRIIAPSRGSPLPVLSWANREEVWKIMLNKEKTYLRDQHFLEQHPLLQPKMRAILLDWLMEVCEVYKLHRETFYLAQDFFDRYMATQENVVKTLLQLIGISSLFIAAKLEEIYPPKLHQFAYVTDGACSGDEILTMELMIMKALKWRLSPLTIVSWLNVYMQVAYLNDLHEVLLPQYPQQIFIQIAELLDLCVLDVDCLEFPYGILAASALYHFSSSELMQKVSGYQWCDIENCVKWMVPFAMVIRETGSSKLKHFRGVADEDAHNIQTHRDSLDLLDKARAKKAMLSEQNRASPLPSGLLTPPQSGKKQSSGPEMA

SEQ ID NO: 5376 - DNA, 1787 bp, Homo sapiens
gtgctcacccggcccggtgccacccgggtccacagggatgcgaaggagcgggacaccatgaaggaggacggcggcgcggagttctcggctcgctccaggaagaggaaggcaaacgtgaccgtttttttgcaggatccagatgaagaaatggccaaaatcgacaggacggcgagggaccagtgtgggagccagccttgggacaataatgcagtctgtgcagacccctgctccctgatccccacacctgacaaagaagatgatgaccgggtttacccaaactcaacgtgcaagcctcggattattgcaccatccagaggctccccgctgcctgtactgagctgggcaaatagagaggaagtctggaaaatcatgttaaacaaggaaaagacatacttaagggatcagcactttcttgagcaacaccctcttctgcagccaaaaatgcgagcaattcttctggattggttaatggaggtgtgtgaagtctataaacttcacagggagaccttttacttggcacaagatttctttgaccggtatatggcgacacaagaaaatgttgtaaaaactcttttacagcttattgggatttcatctttatttattgcagccaaacttgaggaaatctatcctccaaagttgcaccagtttgcgtatgtgacagatggagcttgttcaggagatgaaattctcaccatggaattaatgattatgaaggcccttaagtggcgtttaagtcccctgactattgtgtcctggctgaatgtatacatgcaggttgcatatctaaatgacttacatgaagtgctactgccgcagtatccccagcaaatctttatacagattgcagagctgttggatctctgtgtcctggatgttgactgccttgaatttccttatggtatacttgctgcttcggccttgtatcatttctcgtcatctgaattgatgcaaaaggtttcagggtatcagtggtgcgacatagagaactgtgtcaagtggatggttccatttgccatggttataagggagacggggagctcaaaactgaagcacttcaggggcgtcgctgatgaagatgcacacaacatacagacccacagagacagcttggatttgctggacaaagcccgagcaaagaaagccatgttgtctgaacaaaatagggcttctcctctccccagtgggctcctcaccccgccacagagcggtaagaagcagagcagcgggccggaaatggcgtgaccaccccatccttctccaccaaagacagttgcgcgcctgctccacgttctcttctgtctgttgcagcggaggcgtgcgtttgcttttacagatatctgaatggaagagtgtttcttccacaacagaagtatttctgtggatggcatcaaacagggcaaagtgttttttattgaatgcttataggttttttttaaataagtgggtcaagtacaccagccacctccagacaccagtgcgtgctcccgatgctgctatggaaggtgctacttgacctaagggactcccacaacaacaaaagcttgaagctgtggagggccacggtggcgtggctctcctcgcaggtgttctgggctccgttgtaccaagtggagcaggtggttgcgggcaagcgttgtgcagagcccatagccagctgggcagggggctgccctctccacattatcagttgacagtgtacaatgcctttgatgaactgttttgtaagtgctgctatatctatccattttttaataaagataatactgtttttgagacaaaaaaaa

SEQ ID NO: 5377 - protein, 395 aa, Homo sapiens
MKEDGGAEFSARSRKRKANVTVFLQDPDEEMAKIDRTARDQCGSQPWDNNAVCADPCSLIPTPDKEDDDRVYPNSTCKPRIIAPSRGSPLPVLSWANREEVWKIMLNKEKTYLRDQHFLEQHPLLQPKMRAILLDWLMEVCEVYKLHRETFYLAQDFFDRYMATQENVVKTLLQLIGISSLFIAAKLEEIYPPKLHQFAYVTDGACSGDEILTMELMIMKALKWRLSPLTIVSWLNVYMQVAYLNDLHEVLLPQYPQQIFIQIAELLDLCVLDVDCLEFPYGILAASALYHFSSSELMQKVSGYQWCDIENCVKWMVPFAMVIRETGSSKLKHFRGVADEDAHNIQTHRDSLDLLDKARAKKAMLSEQNRASPLPSGLLTPPQSGKKQSSGPEMA

SEQ ID NO: 5378 - DNA, 2540 bp, Homo sapiens
tataaaagctgggccggcgcgggccgggccattcgcgacccggaggtgcgcgggcgcgggcgagcagggtctccgggtgggcggcggcgacgccccgcgcaggctggaggccgccgaggctcgccatgccgggagaactctaactcccccatggagtcggccgacttctacgaggcggagccgcggcccccgatgagcagccacctgcagagccccccgcacgcgcccagcagcgccgccttcggctttccccggggcgcgggccccgcgcagcctcccgccccacctgccgccccggagccgctgggcggcatctgcgagcacgagacgtccatcgacatcagcgcctacatcgacccggccgccttcaacgacgagttcctggccgacctgttccagcacagccggcagcaggagaaggccaaggcggccgtgggccccacgggcggcggcggcggcggcgactttgactacccgggcgcgcccgcgggccccggcggcgccgtcatgcccgggggagcgcacgggcccccgcccggctacggctgcgcggccgccggctacctggacggcaggctggagcccctgtacgagcgcgtcggggcgccggcgctgcggccgctggtgatcaagcaggagccccgcgaggaggatgaagccaagcagctggcgctggccggcctcttcccttaccagccgccgccgccgccgccgccctcgcacccgcacccgcacccgccgcccgcgcacctggccgccccgcacctgcagttccagatcgcgcactgcggccagaccaccatgcacctgcagcccggtcaccccacgccgccgcccacgcccgtgcccagcccgcaccccgcgcccgcgctcggtgccgccggcctgccgggccctggcagcgcgctcaaggggctgggcgccgcgcaccccgacctccgcgcgagtggcggcagcggcgcgggcaaggccaagaagtcggtggacaagaacagcaacgagtaccgggtgcggcgcgagcgcaacaacatcgcggtgcgcaagagccgcgacaaggccaagcagcgcaacgtggagacgcagcagaaggtgctggagctgaccagtgacaatgaccgcctgcgcaagcgggtggaacagctgagccgcgaactggacacgctgcggggcatcttccgccagctgccagagagctccttggtcaaggccatgggcaactgcgcgtgaggcgcgcggctgtgggaccgccctgggccagcctccggcggggacccagggagtggtttggggtcgccggatctcgaggcttgcccgagccgtgcgagccaggactaggagattccggtgcctcctgaaagcctggcctgctccgcgtgtcccctcccttcctctgcgccggacttggtgcgtctaagatgagggggccaggcggtggcttctccctgcgaggaggggagaattcttggggctgagctgggagcccggcaactctagtatttaggataaccttgtgccttggaaatgcaaactcaccgctccaatgcctactgagtagggggagcaaatcgtgccttgtcattttatttggaggtttcctgcctccttcccgaggctacagcagacccccatgagagaaggaggggagcaggcccgtggcaggaggagggctcagggagctgagatcccgacaagcccgccagccccagccgctcctccacgcctgtccttagaaaggggtggaaacatagggacttggggcttggaacctaaggttgttcccctagttctacatgaaggtggagggtctctagttccacgcctctcccacctccctccgcacacaccccaccccagcctgctataggctgggcttccccttggggcggaactcactgcgatgggggtcaccaggtgaccagtgggagcccccaccccgagtcacaccagaaagctaggtcgtgggtcagctctgaggatgtatacccctggtgggagagggagacctagagatctggctgtggggcgggcatggggggtgaagggccactgggaccctcagccttgtttgtactgtatgccttcagcattgcctaggaacacgaagcacgatcagtccatcccagagggaccggagttatgacaagctttccaaatattttgctttatcagccgatatcaacacttgtatctggcctctgtgccccagcagtgccttgtgcaatgtgaatgtgcgcgtctctgctaaaccaccattttatttggtttttgttttgttttggttttgctcggatacttgccaaaatgagactctccgtcggcagctgggggaagggtctgagactccctttccttttggttttgggattacttttgatcctgggggaccaatgaggtgaggggggttctcctttgccctcagctttccccagcccctccggcctgggctgcccacaaggcttgtcccccagaggccctggctcctggtcgggaagggaggtggcctcccgccaacgcatcactggggctgggagcagggaagg

SEQ ID NO: 5379 - DNA, 851 bp, Homo sapiens
ttgagggtcaattccaaactccttcactttggttgtgttagtagacagggcaacaaagtgcttcgccactgcagaaggatccttggccgcctggagaaaccactccttcgccgtctctgcattcgtgatggtctcctgggtagtaaaggtcttggaggcaatgatgaacagggaggactcggggttcagctgggccagggttttggcaatgtgagttccatcaatgttggagacataccagacgcggggacctcctgaagagtatggcttaagggcttcagtcaccatgaggggtcccaggtcggagccgccaatgccaatgttgatgacgtccgtgatggtcttgcctgtgtaccccttccagtcaccgctccggacacgctggcagaaagacttcatcttgtccagaaccttgttgacctctggcatcacatccttgccgtctaccaggatgggtgtgtttgaccggttccgcagagccacgtgcagcacggctcgaccctcggtgtagttgatcttctcaccattgaacatccgctcccgggcggcctccacgcccctggacttggccaagtccaccagcatccgcatcacgtcctccgtcaccaggttcttggagtaatccaccaggatatgcccatggttggtgttgagggtcaagctgaagtggttgaagcggtccttgttggcatcgaagaggcggcgcaggttcagctcggagcggtgctcgcggtaccattgctgcagcttctggaactgggggtcccgggtgagagcggccatggcgggactagaaggtacactgagtgagacgcgagccgaggaggaaggagcgccggcagcgcgcagca

SEQ ID NO: 5380 - DNA, 576 bp, Homo sapiens
atgacaaagaaaagaaagaacaacaatcatgccaaaaagggccgcggccacatgcagcctatttgctgcatgaactgtgcccgatgcatgcccaagtacaaagccgttaagaaactcctgtatgtgaaactacattactgtgtgagttgtgcaattcacagcaaagtagtcaggaatcgatctcatgaagcccgcaaggacccaacaccccctccccgatttagacctgcggctagtatcctgacaccaaaatccaaccactcgaagacacagacaaaatgttccatgcaagatattggcaaagtgaatgaaattacatataaagaatactataagctgattaaggagaatttacaccagaaacgcaagccaccaccacccccagtgtccccaaggctgaaggtgcaagcttgccctggccctggccctggcatagaaagtgcacgatctggtcatgtcatgcaggtgaggatacctgtgtgccaggtctccagctccctggtgacaagactgacagacaaaactaatggaacctggtacctagaagaggatgagaaggatccccgtgaaccctag

SEQ ID NO: 5381 - protein, 191 aa, Homo sapiens
MTKKRKNNNHAKKGRGHMQPICCMNCARCMPKYKAVKKLLYVKLHYCVSCAIHSKVVRNRSHEARKDPTPPPRFRPAASILTPKSNHSKTQTKCSMQDIGKVNEITYKEYYKLIKENLHQKRKPPPPPVSPRLKVQACPGPGPGIESARSGHVMQVRIPVCQVSSSLVTRLTDKTNGTWYLEEDEKDPREP

SEQ ID NO: 5382 - DNA, 945 bp, Homo sapiens
ggaaacccaagaggaaatgactgagcccgtctgggtccccgcccgctcgcgctcccctggccacaccctccgcctggacgcagcagccaccgccgcgtccctctctccacgaggctgccggcttaggacccccagctccgacatgtcgccctctggtcgcctgtgtcttctcaccatcgttggcctgattctccccaccagaggacagacgttgaaagataccacgtccagttcttcagcagactcaactatcatggacattcaggtcccgacacgagccccagatgcagtctacacagaactccagcccacctctccaaccccaacctggcctgctgatgaaacaccacaaccccagacccagacccagcaactggaaggaacggatgggcctctagtgacagatccagagacacacaagagcaccaaagcagctcatcccactgatgacaccacgacgctctctgagagaccatccccaagcacagacgtccagacagacccccagaccctcaagccatctggttttcatgaggatgaccccttcttctatgatgaacacaccctccggaaacgggggctgttggtcgcagctgtgctgttcatcacaggcatcatcatcctcaccagtggcaagtgcaggcagctgtcccggttatgccggaatcgttgcaggtgagtccatcagaaacaggagctgacaacctgctgggcacccgaagaccaagccccctgccagctcaccgtgcccagcctcctgcatcccctcgaagagcctggccagagagggaagacacagatgatgaagctggagccagggctgccggtccgagtctcctacctcccccaaccctgcccgcccctgaaggctacctggcgccttgggggctgtccctcaagttatctcctctgctaagacaaaaagtaaagcactgtggtctttgc

SEQ ID NO: 5383 - DNA, 1683 bp, Homo sapiens
gtgagcgccgggctcggggcccccccggccgcccgccccctcccctccctccctcccctcccctcccctcccccccgggccccgcgccccccccgcccccgccccccccatggacatgctggacccgggtctggatcccgctgcctcggccaccgctgctgccgccgccagccacgacaagggacccgaggcggaggagggcgtcgagctgcaggaaggcggggacggcccaggagcggaggagcagacagcggtggccatcaccagcgtccagcaggcggcgttcggcgaccacaacatccagtaccagttccgcacagagacaaatggaggacaggtgacataccgcgtagtccaggtgactgatggtcagctggacggccagggcgacacagctggcgccgtcagcgtcgtgtccaccgctgccttcgcgggggggcagcaggctgtgacccaggtgggtgtggacggggcagcccagcgcccgggccccgccgctgcctctgtgcccccaggtcctgcagcgcccttcccgctggctgtgatccaaaatcccttcagcaatggtggcagtccggcggccgaggctgtcagcggggaggcacgatttgcctatttcccagcgtccagtgtgggagatactacggctgtgtccgtacagaccacagaccagagcttgcaggctggaggccagttctacgtcatgatgacgccccaggatgtgcttcagacaggaacacagaggacgatcgccccccggacacacccttactctccaaaaattgatggaaccagaacaccccgagatgagaggagaagagcccagcacaacgaagtggagcggaggcggagggacaagatcaacaactggatcgtccagctttcgaaaatcattccagactgtaacgcagacaacagcaagacgggagcgagtaaaggagggatcctgtccaaggcctgcgattacatccgggagttgcgccagaccaaccagcgcatgcaggagaccttcaaagaggccgagcggctgcagatggacaacgagctcctgaggcagcagatcgaggagctgaagaatgagaacgccctgcttcgagcccagctgcagcagcacaacctggagatggtgggcgagggcacccggcagtgacgcccgccaccaccacgcagccgccgccgcccacgccggcctctgctgcccccttccccagcccttagcacagagagggacacatgcccctcccccagctgcgtttttttatagtagatttttaacaaaaaacggggagaaataatgcatttctgtggatacagtgcccaccgccctcctccacttggaaacggtatcctccctgcccatccgtctgtctgtcgcccttctcccggccctcactaagccccggcacttctagtggtctcacctggaggcaagagggaggggacagaggccctgccacgtcccgctgcctcctgctctctggaggtactgagacagggtgctgatgggaaggaggggagcctttggggggccacccggggcctggacctatgcagggaggccacgtcccaccccacctcttgtttctgggtccctgctcccctttgggggtgtgtgtgtgtgttttaattttctttatggaaaaattgacaaaaaaaaaatagagagagaggtatttaactgca

SEQ ID NO: 5384 - DNA, 1565 bp, Homo sapiens
gaggcccgggagcggcagtggaaccgactcccagaactccggacgtgtgcggcgcagtgagtcgcagccatgttcctggttaactcgttcttgaagggcggcggcggcggcggcgggggaggcgggggcctgggtgggggcctgggaaatgtgcttggaggcctgatcagcggggccgggggcggcggcggcggcggcggcggcggcggcggtggtggaggcggcggtggcggtggaacggccatgcgcatcctaggcggagtcatcagcgccatcagcgaggcggctgcgcagtacaacccggagcccccgcccccacgcacacattactccaacattgaggccaacgagagtgaggaggtccggcagttccggagactctttgcccagctggctggagatgacatggaggtcagcgccacagaactcatgaacattctcaataaggttgtgacacgacaccctgatctgaagactgatggttttggcattgacacatgtcgcagcatggtggccgtgatggatagcgacaccacaggcaagctgggctttgaggaattcaagtacttgtggaacaacatcaaaaggtggcaggccatatacaaacagttcgacactgaccgatcagggaccatttgcagtagtgaactcccaggtgcctttgaggcagcagggttccacctgaatgagcatctctataacatgatcatccgacgctactcagatgaaagtgggaacatggattttgacaacttcatcagctgcttggtcaggctggacgccatgttccgtgccttcaaatctcttgacaaagatggcactggacaaatccaggtgaacatccaggaggtaaggacccccatattggggtatgggtgcctgggaggaccccacccctcagcccttcataccagctctgagctgcagtccccttcctcctattttgccagccgtccctgggtgagggcaaaggggctggtgctcttggggttccctgtcctcactctccaccctcctctccccagtggctgcagctgactatgtattcctgaactggagccccagacccgccccctcactgccttgctataggagtcacctggagcctcggtctctcccagggccgatcctgtctgcagtcacatctttgtggggcctgctgacccacaagcttttgttctctcagtacttgttacccagcttctcaacatccagggcccaatttgccctgcctggagttccccctggctctaggacactctaacaagctctgtccacgggtctccccattcccaccaggccctgcacacacccactccgtaacctctcccctgtacctgtgccaagcctagcacttgtgatgcctccatgccccgagggccctctctcagttctgggaggatgactccagtccctgcacgccctggcacacccttcacggttgctacccaggcggccaagctccagaccgtgccagacccaggtgccccagtgcctttgtctatattctgctcccagcctgccaggcccaggaggaaataaacatgccccagttgctgatctct

SEQ ID NO: 5385 - DNA, 2557 bp, Homo sapiens
ctctgacaaaagcatctcagtgattgacttttactcgggcgagtgcattgccaagatgtttggccattcagaaattattaccagcatgaagttcacctatgactgtcatcacttgatcacagtatctggagacagctgcgtgttcatctggcacctgggcccggagatcaccaactgcatgaagcagcacttgctggagattgaccaccggcagcagcagcagcacacaaatgacaagaagcggagtggccaccccaggcaggatacgtatgtgtccacacctagtgagattcactccctgagccctggagagcaaacagaggatgatctggaggaagagtgtgagccagaagagatgctgaagacaccatccaaagatagcttggatccagatcctcgttgcctgctaaccaacggcaagctgccactgtgggcaaagcggctgctaggggacgatgatgtggcagatggcttggccttccacgccaagcgcagctaccagccccacggccgctgggcagagcgggccggccaagagcccctcaagaccatcctggatgcccaggacctggattgctactttacccccatgaagcccgagagtctggagaactccattctggattcactggagccacagagcctggccagcctgctgagtgagtcagagagtccccaggaagctggccgcgggcacccctccttcctgccccagcagaaggaatcatctgaggccagtgagctcatcctctactctctggaggcagaagtgacagtcacagggacagacagccagtattgcaggaaggaggtggaggccgggcctggagaccagcagggcgactcctacctcagggtgtcctccgacagcccaaaggaccagagcccgcctgaggactcgggggagtcagaggccgacctggagtgcagcttcgcagccatccactccccagctccgcctcctgaccctgcccctcggtttgccacgtcgctgccccatttcccaggatgcgcaggtcccacagaagatgagctgtccctgcccgagggacccagcgtccccagcagctccctaccccagactccggagcaggagaagttcctccgccaccactttgagacactgactgagtccccctgcagagctctgggagacgtggaggcctctgaagctgaagaccacttcttcaacccacgcctgagtatctccacgcagttcctctcaagcctccagaaggcatccaggttcacccataccttccctccccgggcaacccagtgccttgtgaagtctccagaggtcaagctcatggaccgaggcggaagccagcccagagcaggtactggctacgcctccccagacaggacccacgtcctcgctgcagggaaggctgaagagaccctggaggcctggcgcccaccacctccctgccttacgagcctggcgtcctgtgtccctgcttcctccgtgctgcccacagacaggaatctcccaacgcccacatctgcacccaccccaggcctggctcagggtgtccatgccccctccacctgttcctacatggaggccactgccagctcccgtgccaggatatcacgcagcatctccctcggtgacagtgagggccctatcgtggccacactggcccagcccctccgtaggccatcgtccgttggggagctggcctccttgggccaggagcttcaggccatcaccaccgcgacaacacccagtttggacagtgagggccaagagcctgccctgcgttcctggggcaaccacgaggcccgggccaacctgagactgaccctgtcaagtgcctgtgatgggctcctgcagccccccgtggatacccagcctggcgtcaccgtccctgcagtgagcttcccagcccctagccctgtggaagagagcgccctgaggctccacggctctgcctttcgcccaagtctcccagctcctgagtcccctggccttcctgcccaccccagtaacccccagcttccagaggcccggcctggcatccctggcggcactgcctccctcctggagcccacctccggtgcacttggtctgttacagggcagccctgcccgctggagtgagccctgggtgccggttgaagccctgcccccatctccccttgagctgagcagggtggggaacatcttgcacaggctgcagaccaccttccaagaagccctcgacctttaccgtgtgttggtctccagtggccaggtggacaccgggcagcagcaggcacggactgagctggtctccaccttcctgtggatccacagccagctggaggctgaatgcctggtggggactagtgtggccccagcccaggctctgcccagcccaggacccccgtccccaccgacgctgtaccccctggccagcccagacctgcaggccctgctggaacactactcggagctgctggtgcaggccgtgcggaggaaggcacgggggcactgagggcgcagcccctccaccgcagccctgctgcttctgaggacttaggtattttaagcgaataaactgacagctttg

SEQ ID NO: 5386 - protein, 630 aa, Homo sapiens
MKPESLENSILDSLEPQSLASLLSESESPQEAGRGHPSFLPQQKESSEASELILYSLEAEVTVTGTDSQYCRKEVEAGPGDQQGDSYLRVSSDSPKDQSPPEDSGESEADLECSFAAIHSPAPPPDPAPRFATSLPHFPGCAGPTEDELSLPEGPSVPSSSLPQTPEQEKFLRHHFETLTESPCRALGDVEASEAEDHFFNPRLSISTQFLSSLQKASRFTHTFPPRATQCLVKSPEVKLMDRGGSQPRAGTGYASPDRTHVLAAGKAEETLEAWRPPPPCLTSLASCVPASSVLPTDRNLPTPTSAPTPGLAQGVHAPSTCSYMEATASSRARISRSISLGDSEGPIVATLAQPLRRPSSVGELASLGQELQAITTATTPSLDSEGQEPALRSWGNHEARANLRLTLSSACDGLLQPPVDTQPGVTVPAVSFPAPSPVEESALRLHGSAFRPSLPAPESPGLPAHPSNPQLPEARPGIPGGTASLLEPTSGALGLLQGSPARWSEPWVPVEALPPSPLELSRVGNILHRLQTTFQEALDLYRVLVSSGQVDTGQQQARTELVSTFLWIHSQLEAECLVGTSVAPAQALPSPGPPSPPTLYPLASPDLQALLEHYSELLVQAVRRKARGH

SEQ ID NO: 5387 - DNA, 673 bp, Homo sapiens
aagaagactacaatctccggagggaaacctggggcgtctcgcgcaaacgtccataactgaaagtagctaaggcaccccagccggaggaagtgagctctcctggggcgtggttgttcgtgatccttgcatctgttacttagggtcaaggcttgggtcttgccccgcagacccttgggacgacccggccccagcgcagctatgaacctggagcgagtgtccaatgaggagaaattgaacctgtgccggaagtactacctgggggggtttgctttcctgccttttctctggttggtcaacatcttctggttcttccgagaggccttccttgtcccagcctacacagaacagagccaaatcaaaggctatgtctggcgctcagctgtgggcttcctcttctgggtgatagtgctcacctcctggatcaccatcttccagatctaccggccccgctggggtgcccttggggactacctctccttcaccatacccctgggcaccccctgacaacttctgcacatactggggccctgcttattctcccaggacaggctccttaaagcagaggagcctgtcctgggagccccttctcaaactcctaagacttgttttcatgtcccacgttctctgctgacatcccccaataaaggaccctaactttccaaaaaaaaaaaaa

SEQ ID NO: 5388 - protein, 232 aa, Homo sapiens
MAKARNQLDAVLQCLLEKSHMDRERLDEEAGKTPSDTHNKDCSIAATGKRPSARFPHQRRKKRREMDDGLAEGGPQRSNTYVIKLFDRSVDLAQFSENTPLYPICRAWMRNSPSVRERECSPSSPLPPLPEDEEGSEVTNSKSRDVYKLPPPTPPGPPGDACRSRIPSPLQPEMQGTPDDEPSEPEPSPSTLIYRNMQRWKRIRQRWKEASHRNQLRYSESMKILREMYERQ

SEQ ID NO: 5389 - DNA, 1678 bp, Homo sapiens
ggcacgaggggggagagtagacagcagaaccagcggcggcggctaagcagagactgtagtagcggcgacagcgacgacggcagcgatggctggggcggggccagccccgggactcccgggtgcaggaggacccgtggtcccgggtcctggcgctggcatcccgggcaaaagcggcgaggaacgcttgaaggaaatggaggcggagatggccctgtttgagcaggaagttctgggggctccagtacctggaatcccaactgctgtgcctgcggtgcccactgtccccacggtccccacagtagaagcgatgcaggtcccagcggctcctgtgatccgcccaattatcgcgaccaacacataccagcaggtccagcagactctggaggcccgagcagctgctgcagccacagtagttcctcccatggtgggtggccctccttttgtaggccctgttggctttggccctggtgatcggagtcacctggacagcccagaggctcgagaagccatgttcctgcggcgggcagctgtggccccccagagggcccctatcctgcgtccagccttcgtcccccacgtgctacagagagcagattccgctctctcctctgcagcagccggcccccgccctatggccctacggccccctcaccaggccctcgtgggcccccctctgcctgggccccctggaccacccatgatgctgccaccaatggctcgggctccagggcccccgctgggctccatggctgcactgaggccccctctggaagagccagcagcaccccgagagctgggcctaggcctggggttgggcctgaaagagaaggaagaggcagtggtggcggcggcggctgggctggaggaggctagcgcggctgtggccgtgggggcaggaggtgccccagctggccctgcagtcattgggcccagcctgccgctggccctggccatgccattgcccgagcctgagcccctgcccctcccgttggaggtcgtccgcggcctcctgcccccgctgcgcattcctgaactcctgtccctgcgtcctcggccccggccccctcggccagagccacccccaggcctcatggctcttgaggtcccagagcccctgggtgaagacaagaagaaggggaagccagagaaattgaaacggtgcattcgcacagcggcagggagcagctgggaggaccccagcctgctggagtgggatgcagatgacttccggatcttctgtggggatctgggcaatgaggtgaacgatgacatcttggcacgcgccttcagccgcttcccatccttccttaaggccaaggtgatccgtgacaagcgcacaggcaagaccaagggctacggcttcgtcagcttcaaggaccccagcgactacgtgcgcgccatgcgtgagatgaatgggaagtatgtgggctcgcgccccatcaagcttcgcaagagcatgtggaaggaccggaatctggacgtggtccgcaagaagcagaaggaaaagaagaagctgggcctgagatagggtctgtggccaggcacccgctcccacctggccgggcgctggctcctccctcagttctctttggaaaacccccagctgtccacccatcccctgccccaaaaccagtttcaataaatttacgttcatttccaaaaaaaaaaaaaaaaaaaa

SEQ ID NO: 5390 - protein, 480 aa, Homo sapiens
MAGAGPAPGLPGAGGPVVPGPGAGIPGKSGEERLKEMEAEMALFEQEVLGAPVPGIPTAVPAVPTVPTVPTVEAMQVPAAPVIRPIIATNTYQQVQQTLEARAAAAATVVPPMVGGPPFVGPVGFGPGDRSHLDSPEAREAMFLRRAAVAPQRAPILRPAFVPHVLQRADSALSSAAAGPRPMALRPPHQALVGPPLPGPPGPPMMLPPMARAPGPPLGSMAALRPPLEEPAAPRELGLGLGLGLKEKEEAVVAAAAGLEEASAAVAVGAGGAPAGPAVIGPSLPLALAMPLPEPEPLPLPLEVVRGLLPPLRIPELLSLRPRPRPPRPEPPPGLMALEVPEPLGEDKKKGKPEKLKRCIRTAAGSSWEDPSLLEWDADDFRIFCGDLGNEVNDDILARAFSRFPSFLKAKVIRDKRTGKTKGYGFVSFKDPSDYVRAMREMNGKYVGSRPIKLRKSMWKDRNLDVVRKKQKEKKKLGLR

SEQ ID NO: 5391 - DNA, 4282 bp, Homo sapiens
cggtgtcgccgccgcggcgctgtcatggagctagcgcaggaagcgcgggaactgggttgctgggcggtcgaagagatgggggtgcccgtggcggcccgggccccggaatcgacgctgcgcaggctgtgtctgggccagggggctgacatctgggcctacatcttgcagcatgtgcacagtcagaggactgtcaagaagatccggggaaacctactctggtatggccaccaggacagtccacaggtccgtcggaagttagagctggaagctgctgtgacccgcctgcgggcagaaatccaggaactcgaccagagcctggagctgatggagcgagacactgaggctcaggacacggccatggagcaggcacgtcagcacactcaagacacccagcgtcgagctctcctcctccgggcccaagctggggccatgcgaagacagcagcatacgctccgagatcccatgcagcggctgcagaatcaactgaggcgcctgcaggacatggagaggaaagccaaagtagatgtgacctttggatccctcacgtcggcagctctgggcctggagcccgtggtcctgcgtgatgtccgaacagcctgcaccctccgggcccagttcctgcagaacctcctgcttccccaggccaagaggggcagcctcccaacccctcatgatgaccactttggcacttcgtaccagcagtggctgagctcagtggagacgctgctgacaaaccaccccccaggccacgtcctggctgccttggagcacctggctgcagagcgggaggcagagattcggtccctgtgcagtggggatgggcttggcgacacagagatatccagaccccaggccccggaccagtcagactccagccagaccctgccgtccatggttcatctcatccaggagggctggcggactgtgggtgtgctggtctcccagcggagcaccctcctgaaggagcggcaagtcttgacccagcgcctccagggcctggtggaggaggtggagagacgcgtcctgggatccagtgagaggcaggtgctgatactggggcttcggcgctgttgcctgtggacggagctcaaggccctgcacgatcagagccaggagctgcaggatgcagctgggcatcggcagctcctgctgagggagctacaggccaaacagcagcggatcctgcactggcgccagctggtggaggagacccaggaacaggtccgcctgctcatcaagggaaactcggccagcaagacccgcctgtgccggagcccgggggaggtgctagctctggtccagcgaaaggtggtccctacatttgaggcagtggcaccacagagccgggagctgctgcgctgtctggaggaggaagtccggcatttgccccacattctgttgggcacgctgctgcggcacaggccgggagagttgaagcccctgcccacggtcctcccatccatccaccagctgcaccccgcgtccccaaggggctccagcttcatagcgctgagccacaagctggggctgcctccagggaaggcctcggagctgctcctgccggcggctgcctctcttcgccaggaccttctgctcctgcaggaccagcggagcctctggtgctgggatctactccacatgaagaccagcctgccgccaggccttcccacccaggagctgctgcagatccaggcatcccaggaaaaacagcagaaagagaacctggggcaggctctgaagaggctggagaagctactgaaacaggcactggagcgaatccctgagctgcaggggatcgtgggggactggtgggagcagccaggccaggccgccctctctgaggagctctgccagggcctgtccctgccccagtggcggctgcgctgggttcaggcccagggggccctgcagaagctgtgcagctgaagagagggttcaaacggaagccgagaacttgacactgttcaccccaacacctcacctcccccaggacatttggaagaaagcagcgccaggattcctcggcagtcgtccccacccgcacctgcagtcccctcatgtgctgttctgctgccccactcagctcctggaccctgtcctttcatcccgctaaagcaccccctaaaaccccttcatcactttcattctcagcaaaaagtaattgagcacctcctctaggcgctggggagtccacactgaacaaaagaaacagaaaaccctgtcttccagcagttgagttctagggcagggagacagagtttacaagataaggaaaatatatatgtagtatgctgcaagttaactgctgtgtgggaaatccagcagggggtgggatgtgtgatttgaattgagggccacactgcccaggtcgtgctccgtcaaggggtgagcaggagcaacaggggtggctgagtaagggcttgcagctggaggcaacagcacatgcaaaggccctgagccaggatgtgctgcaataagggccactgagggggacagtgtaggttgggggtgaggaatgtattaaaagatgagattgccttctagtttgtatagtttctttttttacatgtaaatcagccatttggaatttatcctagcacatggatccaattttgtcttattttacatatatcctagtagcacttactgaaattcccagtcagagtggcagttgcctctgagggaaggtgggtggcagggatcaactgaggaggagacacagaaatgtcctagctgatgggaatgtgctgtgtcaagagcagcggcggtgacgcaggtgtagagatttgtcagagctcatgtagttgtagtcttaaggcctgtgcatttcactgcgtgggttactcaatttataaagcaaagcccttacacttttgagatgccacctttttatgcactaaatttccatgtttaattgggttatatctggcttctctccagacctgctttgtatttaactctccatgtgtcattcctacagtagcttaatagaaaggcttgtgacacattgtcatatctgttcttgttttcttttgttttttttttttttttttttgagatgcagtctcattctgttgcccaagttggagtgcagtggcatgatctcagctcactgcaacctccgcctcccaggttcaagccattctcatgcctcagcttccccagtagctaggattacaggtacgcaccaccacgcccagctcatttttgtacttttagtagggacggggtttcatcatgttggccagactggtctcgaactcctgacctcaagtgatctgcctgcctcggcctcccaaagtgctgggattacaggcatgagccaccgcgcctgaccacattgccatatctgaaatggctggattctcttaggtgcttttctttttctttctttctttctttttttgagacagaatctggctgtttcccaggctgaagtgcagtggcatgaactcagctcactgcaacctctgcctcctggattcaaacaattctcatgtctcagcctcctgaatagctgggattacaggcacccaccaccatatctggctaatatttgtattttttgtagagtcggagctttaccatgttggtcaggctgctctccaactcctggcctcaagtgattctatcgcctctgcctcccaaatcttcacctgctgggattagtttcccctgtctcagtaaattttttttcccaaactaagtgaacattagatttaatttggctggccccagaagaaaaacatgcacagatggtagttttactggtgttgcagtaagttttcaaatttggaagtttggcagctttatgatcttgaaccttgctgtccatctctcacacaactcctctcttggcctccagagtccctttactctcccagctttcctcctgcccctggctgctgtttcccagcctttccacattggctttcccatgtagtccttagtgtgtctgctcctcctctctctcctcatcacagttcccagcccccaccttcaactgaactcaacaaaatcttcaacttcatacagtagtcacattgttagtaataacactggcatttttattttgataaaatagaccgtttaaatttttgagattctaccttatattttttgaattatatactaaagcaaataagtagtgatgtaatgtcattggggaccaagatttttagtgtaaatgaaaaaagataacaaatataaactcaagtaaacaccctgtagtctttcacatgaattggaaatatcagaataaagtcatgatttttctctttct

SEQ ID NO: 5392 - protein, 633 aa, Homo sapiens
MELAQEARELGCWAVEEMGVPVAARAPESTLRRLCLGQGADIWAYILQHVHSQRTVKKIRGNLLWYGHQDSPQVRRKLELEAAVTRLRAEIQELDQSLELMERDTEAQDTAMEQARQHTQDTQRRALLLRAQAGAMRRQQHTLRDPMQRLQNQLRRLQDMERKAKVDVTFGSLTSAALGLEPVVLRDVRTACTLRAQFLQNLLLPQAKRGSLPTPHDDHFGTSYQQWLSSVETLLTNHPPGHVLAALEHLAAEREAEIRSLCSGDGLGDTEISRPQAPDQSDSSQTLPSMVHLIQEGWRTVGVLVSQRSTLLKERQVLTQRLQGLVEEVERRVLGSSERQVLILGLRRCCLWTELKALHDQSQELQDAAGHRQLLLRELQAKQQRILHWRQLVEETQEQVRLLIKGNSASKTRLCRSPGEVLALVQRKVVPTFEAVAPQSRELLRCLEEEVRHLPHILLGTLLRHRPGELKPLPTVLPSIHQLHPASPRGSSFIALSHKLGLPPGKASELLLPAAASLRQDLLLLQDQRSLWCWDLLHMKTSLPPGLPTQELLQIQASQEKQQKENLGQALKRLEKLLKQALERIPELQGIVGDWWEQPGQAALSEELCQGLSLPQWRLRWVQAQGALQKLCS

SEQ ID NO: 5393 - DNA, 878 bp, Homo sapiens
ggcacgagggccctggccgtggcgaaagagccggcggagccggagacccgctcccggagacgccgcctcgcgatccccgcgcgggcgggaccgggcggccggcatcatgaccctgtttcacttcgggaactgcttcgctcttgcctacttcccctacttcatcacctacaagtgcagcggcctgtccgagtacaacgccttctggaaatgcgtccaggctggagtcacctacctctttgtccaactctgcaagatgctgttcttggccactttctttcccacctgggaaggcggcatctatgacttcattggggagttcatgaaggccagcgtggatgtggcagacctgataggtctaaaccttgtcatgtcccggaatgccggcaagggagagtacaagatcatggttgctgccctgggctgggccactgctgagcttattatgtcccgctgcattcccctatgggtcggagcccggggcattgagtttgactggaagtacatccagatgagcatagactccaacatcagtctggtccattacatcgtcgcgtctgctcaggtctggatgataacacgctatgatctgtaccacaccttccggccagctgtcctcctgctgatgttcctcagtgtctacaaggcctttgttatggagaccttcgtccacctctgctcgctgggcagttgggcagctctactggcccgagcagtggtaacggggctgctggccctcagcactttggccctgtatgtcgccgttgtcaatgtgcactcctaggcttggtgtctcagacattgatgtaccttttccctgcctcgctccaggttttagtgaagtaaacagtatttggaaagttaaaaaaaaaaaaaaaaaa

SEQ ID NO: 5394 - protein, 224 aa, Homo sapiens
MTLFHFGNCFALAYFPYFITYKCSGLSEYNAFWKCVQAGVTYLFVQLCKMLFLATFFPTWEGGIYDFIGEFMKASVDVADLIGLNLVMSRNAGKGEYKIMVAALGWATAELIMSRCIPLWVGARGIEFDWKYIQMSIDSNISLVHYIVASAQVWMITRYDLYHTFRPAVLLLMFLSVYKAFVMETFVHLCSLGSWAALLARAVVTGLLALSTLALYVAVVNVHS

SEQ ID NO: 5395 - DNA, 390 bp, Homo sapiens
atggccgttgccagcttgccttccgtgctagtcgcatctcagcaggatcccctcccagatttggtcctggtgcttgatggtcgaggccatctcctgggccgcctggcggccatcgtggctaaacaggtactgctgggccggaaggtggtggtcgtacgctgtgaaggcatcaacatttctggcaatttctacagaaacaagtgcccctaccacttccgggcccccagccgcatcttctggcggaccgtgcgaggtatgctgccccacaaaaccaagcgaggccaggccgctctggaccgtctcaaggtgtttgacggcatcccaccgccctacgacaaggtgagctatgccaaaccccacaggcagcggccttacctgtggcgtccatga

SEQ ID NO: 5396 - DNA, 5718 bp, Homo sapiens
aaaaaatagccaggcgtggtggcacatgcctataatcccagctactcaggtggctgaggcaggagaatcgcttgaacccaggaggcagaggctgcagtgagctgaggtcacaccactgcactccagcctgggtgacagagtgagactctgtctcaaaaaacaaacaaacaagcaaaaatcaaaaacattgtttcagatcttattttcctattgacctaagagttatttaatatagacttttgaattttcaggtagattttacttgtgtttcttttaattttattattaatttccagttttagtagaaaatgtctatataatttcaaccttttttttttgctaactcctagttttgtgtctagatttcagctttttaatagagaccaccttatcataattgaaaacctcatcctgtttctctctcatacacaactcattcagcttgtagattttcctctggctgttcctgttgctggcttgccatcctctggcctacatgtaacgtgacttctgttagcaagtccttcacattcagatgactgcaacagttgaacatgcacattacttttttccacatttctgagttacaggcatatcctgtctttttgtgccatgaatttcataagaacttcagtaagatatagacgtgttttcctgtccgaaaaatcactgatacacatttcctaaaaaaacaggaatggccttgactatgagggaatggaaaggagaaaacctgagcaatgggaggaaagaacaaaaccagttgaacatttgtcaaatgaatgagtaatagaataagttgaagggaagattgagtaggtagaactcctcaatacctttgctatggtgtagagacaaagaaaaagttacccatagctatgtgaaggggcaaatgggcagtgcactgcataggtaaaggcataagcagtggcagatgcataggaatatacagccacctatttccattcttgtatttagctgggctgccctggatgaataaagagaatatttaatcactgtagtaaggcatgagagactagaggcagagagatacatttagaacaagtatgtagctatgggaattaaatgagtaaaacctattatatgcttagcatttattacttaatgtagcgttaactagggattgtttctgtccttgaggaggtttataggtaagaataggcagtataacaattggagaagttaataaatatataatttttaaattgagagctattataaaggcaaggaatagagaatagcaacatggatttaggtactatcaatagggtcaaccttaaaggaaatgacttttaatctaagatctcaagatgaaaggagccagccatgcaaagagcccaatcaggagatttgtgggagatagaacagactgtgaagagtcctaagagatggaagtaagttaggacatgtgaggtctgcaaggaggcctctccagggagcagtaaaggggacactggtttgagatcatatgatgtaggtaagcagaggccttcttaaccacagtgagcttgactggattctgagaatgaagaaagatgaaaaaaatttaagtatagattctcgacctctcatcttcatcagaattatcatgtagagaatattaaatatccttccaggactgcagagtctgatccaggtggtttgggtggtgtctaaacctcagtgttagtaacaagctatgtggtgattctgatccacacctcaatatgagaaccactgacttaaaatgtttacttcatcaccaatcttgctattttgtatgaactctcatttttcctgatgttccctttggctttttttttctttccaaattgtataacaatattttagagttttggttaaggattacttttgttgtcttttatttctacattagaaatgttgcttcttttagtaaaagaaaacagcatgtgtttgctttcttgttttattttagatttggagaccaagtatgagaccaagaagttatctttagaaaatgacatttatgaaataaatttatcccagtggaagataatggaaagaattgaaaaccatggccttaagggtctcattttaaaaaatgattgggaatccacaggaaaaattgaaggacaggagagacctcaagaaggatacttcagtagtgtgaaaatgccatctgaaaaggtgtcctcttaccagaaacgcacatctgttactccacatcagagacttcattttgttgataaaccctatgaatgtaaggaatgtgggaaggcgttcagagtgcgccaacagcttacttttcatcacagaattcatactggtgaaaaaccgtatgaatgtaaggaatgtgggatggccttcagacagactgcacaccttactcgacatcagagacttcattctggtgaaaaactctatgaatgtaaggaatgtggggaagctttcatatgtggtgcagatcttagagtacatcagaaaatgcatattggtgagaagccctatgaatgtaaagaatgtgggaaggcttttagggtacgaggacaacttactctgcatcagaggattcatactggtgagaaaccctatgtgtgtaaagagtgtggaaaagcctttagacagtacgcacacctgactcggcatcagaagcttaatagtgctgacaggctctatgaatgcaaagaatgtgggaaggcctttttgtgtggctctggtcttagagtacatcacaaacttcatactggtgagaaaccctatgaatgtaaggaatgcgggaaggcctttagagtgcgacaacaactaacactccatcagagaattcatactggtgagaaaccctatgaatgtaaggaatgtggaaagacctttagccgtggttatcatcttattctccatcacagaattcatactggtgaaaaaccttacgaatgtaaggaatgctggaaagcctttagtcgctactcacaacttatttcacatcagagtattcatattggtgttaagccctatgactgtaaggaatgcgggaaggccttcagactactttcacaactcacacagcatcagagtattcatattggtgagaaaccttataaatgtaaggaatgtggcaaggcctttagattgcgccaaaaacttactctacatcagagcattcatactggcgaaaaaccctttgagtgtaaggaatgtaggaaggcctttagacttaattcatcccttattcaacatctgagaattcattctggtgagaaaccctatgaatgtaaggaatgtaagaaggcctttaggcaacattcacaccttactcatcatctgaaaattcataatgtaaaaatctaagaaagtcttttcaacttctgtgttatagaacattctatgaatgtagtaattaatctattttgctccatacatgcaactgcgttggcattagaggttttataccattaaaagagtgtgacaatgtattgtagtccatcatcactcaaacctgaaacttcagcatatttgttctaaaaactaatcctgttataagaatgaaaaagacatttaccgtcatccctatcccatcactttgtgtcatactggacaagacgcttaactgctctgtgctataattttttaatttatgacatggtcatataagagtgcagcagtttgacacactttcaatcaagaggtggaatctacatccctctgttgtatacaggaatctacatccctctgtgactgcttcgcccagtagaatatggtagacgtactgctgtgctggtttcttgactcagactttactggtagggttacttcatctcatgaaatgacagaactgtcttgttacaaagtctggctactttgctgaagagaccacatgaagaggccctgaaactacgtagagagggagaggcacctgctgaaccctgtcttcttgacatccaccaagataccagacatttgagtgaaattttggatccaccagaccagccaccagctaaatgccagtgagcgacttggtaacctgaactgatgccatgtagaatggaagaattgaccagctgagcccctggcccaaatttctgacccacaaaaacatgagatataataaaatggttgttgttttaagccactaaactttcttttattatcatactaaatatttatttttacataattcatactaaaggctgtgggcataatgagtatagaaatgccttccaccaacatttaatcttcattgaacttgagatatcttattctcgttaaaatattgaaagtaaggaattcctttccagtttgttcattaaaaaacagataccctagaccaggtgaggtggcccatgcctgtaaatccagcactttgggaggccaagtaaggacgattgcttgaggccagaagttcgagaccagcctgggcaacatggtgagaccctgtctctaccaaaaaactttaaaaattagctgggcataatggtgcatgcctgtagtcctagctactcgaggctgaggtgggaggatcatttgaacccaagagttgaggcttcagtgagctgtgattgtaccactgcactccagcttgagtgactgcaagaccctgtctcaaaaaaaaaaaaaaactacaatcagtattctctggccccagtcaatattaaaaattgacaaaggataacatgaaactttggaaattaaaagtcacctgtattatgaagccccattaattttttaaactacttcattgttttttaaaaatgctaaattgtcaatttagcattttgaggcaatcccctcaaattggctcctgtgtccttttatcatgaccactccaacctttgagcttttttttttcctgaaccaaatgcattgattagttatggagcatactagagcattattaacaaataaaggaaaagaatggaatatttaccttgcctatcctttacaaactatatttcaagacaaccaaaagttggtgaaggaaagttgttgattagagaattccaactggttaaaaggtcaaaggaggccaggcgcggtggctcaagcctgtaatcccagcactttgggaggccgaggcaggtggatcgtgaggtcaggagatcaagaccatcctggctaacacggtgaaaccccatctctactaaaaatacaaaaaattcgccgggcgtggtggcaggcgcctgtagtcccagctactcaggaggctgaggcaggagaatggcttgaacccgggaggcggagcttgcagtgagccgagatcgcgccactgcactccagcctgggtgacagaccgagactctgtctcaaacaaaaaacaaaaaacaaaacaaaacaaagatcaaatgaatgatagaatttgaaaactacgctctttaattttacaaaatcatggattttcgtggtgatagcaatggatgcgaagaccattaggtgaaaaatggataggaagcttataatgcatggagcagaatgacaggacactaatctatattaacatctctaaatgagatcagccagatgaacttgatgtgatgaaatggatacacacagtggacacctgtgaagttttcttggctcccccaaaactgagaagtacaagttagtctccaaacctaattaccagtttacaggaaacatggggaataaaagaacaaattaacaacacaaagaagcaaacaaccaaatgcacaatttgggaaattctgcagaagtaatggcctagttttttaaccaatacatgtc

SEQ ID NO: 5397 - protein, 475 aa, Homo sapiens
MLLLLVKENSMCLLSCFILDLETKYETKKLSLENDIYEINLSQWKIMERIENHGLKGLILKNDWESTGKIEGQERPQEGYFSSVKMPSEKVSSYQKRTSVTPHQRLHFVDKPYECKECGKAFRVRQQLTFHHRIHTGEKPYECKECGMAFRQTAHLTRHQRLHSGEKLYECKECGEAFICGADLRVHQKMHIGEKPYECKECGKAFRVRGQLTLHQRIHTGEKPYVCKECGKAFRQYAHLTRHQKLNSADRLYECKECGKAFLCGSGLRVHHKLHTGEKPYECKECGKAFRVRQQLTLHQRIHTGEKPYECKECGKTFSRGYHLILHHRIHTGEKPYECKECWKAFSRYSQLISHQSIHIGVKPYDCKECGKAFRLLSQLTQHQSIHIGEKPYKCKECGKAFRLRQKLTLHQSIHTGEKPFECKECRKAFRLNSSLIQHLRIHSGEKPYECKECKKAFRQHSHLTHHLKIHNVKI

SEQ ID NO: 5398 - DNA, 646 bp, Homo sapiens
tggatggtgaaccctgattctgaagtcggtgtctgctgtgttcatggcaggattcggttaggaggaacagcacagcatgctgggctctggatttaaagctgagcacttaagagtgaatttgagattagtcataaatcgccttgaactattggaggaaaaaaaaaaaaaacagaactggcccagaaagcaaggaaggagattgctgactatctggctgctgggaaagatgaacgagctcggatccgtgtggagcacattatccgggaagactacttcgtggaggccatggagatcctggagctgtactgtgatctgctgctggctcggtttggccttatccagtctatgaaggaactagattctggtctggctgaatctgtgtctacattgatctgggctgctcctcgactccagtcagaagtggctgagttgaaaatagttgctgatcagctctgtgccaagtatagcaagtaatatggcaagctatgtaggaccaaccagattggaactgtgaatgacagtttaaggcctcgcttagttgtactggattctcagggagtcctctgtggccttttgctctgagtgctgtttcccttgtaccagagggcagcaccatggaaattctgtttttcctgtagcatattgt

SEQ ID NO: 5399 - DNA, 1274 bp, Homo sapiens
tgccagtccatctgacatcaaagccagtgtctctaatggtgacaccaccctcctctgcagcaggaggcagagctgtgggatgaatgaggttcgccaggtctcccttacctatcctgggtccccagctccttctcactctcttcccttgcagcctcgaagcggaggatccctgtgtcccagccgggcatggcgacccccaccagcttttcgatgacacaagttcagcccagagccggggctatggggcccagcgggcacctggtggcctgagttatcctgcagcctctcccacgccccatgcagccttcctggctgacccggtgtccaacatggccatggcctatgggagcagcctggccgcgcagggcaaggagctggtggataagaacatcgaccgcttcatccccatcaccaagctcaagtattactttgctgtggacaccatgtatgtgggcagaaagctgggcctgctgttcttcccctacctacaccaggactgggaagtgcagtaccaacaggacaccccggtggccccccgctttgacgtcaatgccccggacctctacattccagcaatggctttcatcacctacgttttggtggctggtcttgcgctggggacccaggataggttctccccagacctcctggggctgcaagcgagctcagccctggcctggctgaccctggaggtgctggccatcctgctcagcctctatctggtcactgtcaacaccgacctcaccaccatcgacctggtggccttcttgggctacaaatatgtcgggatgattggcggggtcctcatgggcctgctcttcgggaagattggctactacctggtgctgggctggtgctgcgtagccatctttgtgttcatgatccggacgctgcggctgaagatcttggcagacgcagcagctgagggggtcccggtgcgtggggcccggaaccagctgcgcatgtacctgaccatggcggtggcggcggcgcagcctatgctcatgtactggctcaccttccacctggtgcggtgagcgcgcccgctgaacctcccgctgctgctgctgctgctgggggccactgtggccgccgaactcatctcctgcctgcaggccccaaggtccaccctgtctggccacaggcaccgcctccatcccatgtcccgcccagccccgcccccaacccaaggtgctgagagatctccagctgcacaggccaccgccccagggcgtggccgctgttacagaaacaataaaccctgatgggcatgg

SEQ ID NO: 5400 - protein, 317 aa, Homo sapiens
MRFARSPLPILGPQLLLTLFPCSLEAEDPCVPAGHGDPHQLFDDTSSAQSRGYGAQRAPGGLSYPAASPTPHAAFLADPVSNMAMAYGSSLAAQGKELVDKNIDRFIPITKLKYYFAVDTMYVGRKLGLLFFPYLHQDWEVQYQQDTPVAPRFDVNAPDLYIPAMAFITYVLVAGLALGTQDRFSPDLLGLQASSALAWLTLEVLAILLSLYLVTVNTDLTTIDLVAFLGYKYVGMIGGVLMGLLFGKIGYYLVLGWCCVAIFVFMIRTLRLKILADAAAEGVPVRGARNQLRMYLTMAVAAAQPMLMYWLTFHLVR

SEQ ID NO: 5401 - DNA, 928 bp, Homo sapiens
cggggcggcaggcttctcgagctccgggcccgcggcaacctcgggcgctgttctgcaggccgcgaccggcatgtacgagcaactcaagggcgagtggaaccgtaaaagccccaatcttagcaagtgcggggaagagctgggtcgactcaagctagttcttctggagctcaacttcttgccaaccacagggaccaagctgaccaaacagcagctaattctggcccgtgacatactggagatcggggcccaatggagcatcctacgcaaggacatcccctccttcgagcgctacatggcccagctcaaatgctactactttgattacaaggagcagctccccgagtcagcctatatgcaccagctcttgggcctcaacctcctcttcctgctgtcccagaaccgggtggctgagttccacacggagttggagcggctgcctgccaaggacatacagaccaatgtctacatcaagcacccagtgtccctggagcaatacctgatggagggcagctacaacaaagtgttcctggccaagggtaacatccccgccgagagctacaccttcttcattgacatcctgctcgacactatcagggatgagatcgctgggtgcatcgagaaggcctacgagaaaatccttttcactgaggccacccggatcctcttcttcaacacacccaaaaagatgacagactacgccaagaagcgagggtgggtcctgggccccaacaactactacagttttgccagccagcagcagaagccggaagacaccaccattccctccacagaactggccaaacaggtcatcgagtatgcccggcagctggagatgatcgtctgagccccccgggcactgggtggggcagggcacgagttatttaaaacagttacactgcagggtttcgcccaataaaggtggactgac

SEQ ID NO: 5402 - protein, 257 aa, Homo sapiens
MYEQLKGEWNRKSPNLSKCGEELGRLKLVLLELNFLPTTGTKLTKQQLILARDILEIGAQWSILRKDIPSFERYMAQLKCYYFDYKEQLPESAYMHQLLGLNLLFLLSQNRVAEFHTELERLPAKDIQTNVYIKHPVSLEQYLMEGSYNKVFLAKGNIPAESYTFFIDILLDTIRDEIAGCIEKAYEKILFTEATRILFFNTPKKMTDYAKKRGWVLGPNNYYSFASQQQKPEDTTIPSTELAKQVIEYARQLEMIV

SEQ ID NO: 5403 - DNA, 15359 bp, Homo sapiens
tctacctcgcgggtgcctctggtgtctccagaggtctccgaccccagcccgcccccagccctcccgcccagcccgcagccccctccctctgttccccgacctcagaccctgggcttccgacctcgacatcatgggtgacgcagaaggcgaagacgaggtccagttcctgcggacggacgatgaggtggtcctgcagtgcagcgctaccgtgctcaaggagcagctcaagctctgcctggccgccgagggcttcggcaaccgcctgtgcttcctggagcccactagcaacgcgcagaatgtgccccccgatctggccatctgttgcttcgtcctggagcagtccctgtctgtgcgagccctgcaggagatgctggctaacacggtggaggctggcgtggagtcatcccagggcgggggacacaggacgctcctgtatggccatgccatcctgctccggcatgcacacagccgcatgtatctgagctgcctcaccacctcccgctccatgactgacaagctggccttcgatgtgggactgcaggaggacgcaacaggagaggcttgctggtggaccatgcacccagcctccaagcagaggtctgaaggagaaaaggtccgcgttggggatgacatcatccttgtcagtgtctcctccgagcgctacctgcacctgtcgaccgccagtggggagctccaggttgacgcttccttcatgcagacactatggaacatgaaccccatctgctcccgctgcgaagagggcttcgtgacgggaggtcacgtcctccgcctctttcatggacatatggatgagtgtctgaccatttcccctgctgacagtgatgaccagcgcagacttgtctactatgaggggggagctgtgtgcactcatgcccgctccctctggaggctggagccactgagaatcagctggagtgggagccacctgcgctggggccagccactccgagtccggcatgtcactaccgggcagtacctagcgctcaccgaggaccagggcctggtggtggttgacgccagcaaggctcacaccaaggctacctccttctgcttccgcatctccaaggagaagctggatgtggcccccaagcgggatgtggagggcatgggcccccctgagatcaagtacggggagtcactgtgcttcgtgcagcatgtggcctcaggactgtggctcacctatgctgctccagaccccaaggccctgcggctcggcgtgctcaagaagaaggccatgctgcaccaggagggccacatggacgacgcactgtcgctgacccgctgccagcaggaggagtcccaggccgcccgcatgatccacagcaccaatggcctatacaaccagttcatcaagagcctggacagcttcagcgggaagccacggggctcggggccacccgctggcacggcgctgcccatcgagggcgttatcctgagcctgcaggacctcatcatctacttcgagcctccctccgaggacttgcagcacgaggagaagcagagcaagctgcgaagcctgcgcaaccgccagagcctcttccaggaggaggggatgctctccatggtcctgaattgcatagaccgcctaaatgtctacaccactgctgcccactttgctgagtttgcaggggaggaggcagccgagtcctggaaagagattgtgaatcttctctatgaactcctagcttctctaatccgtggcaatcgtagcaactgtgccctcttctccacaaacttggactggctggtcagcaagctggatcggctggaggcctcgtctggcatcctggaggtcctgtactgtgtcctcattgagagtccagaggttctgaacatcatccaggagaatcacatcaagtccatcatctccctcctggacaagcatgggaggaaccacaaggtcctggacgtgctatgctccctgtgtgtgtgtaatggtgtggctgtacgctccaaccaagatcttattactgagaacttgctgcctggccgtgagcttctgctgcagacaaacctcatcaactatgtcaccagcatccgccccaacatctttgtgggccgagcggaaggcaccacgcagtacagcaaatggtactttgaggtgatggtggacgaggtgactccatttctgacagctcaggccacccacttgcgggtgggctgggccctcaccgagggctacaccccctaccctggggccggcgagggctggggcggcaacggggtcggcgatgacctctattcctacggctttgatggactgcatctctggacaggacacgtggcacgcccagtgacttccccagggcagcacctcctggcccctgaagacgtgatcagctgctgcctggacctcagcgtgccgtccatctccttccgcatcaacggctgccccgtgcagggtgtctttgagtccttcaacctggacgggctcttcttccctgttgtcagcttctcggctggtgtcaaggtgcggttcctccttggtggccgccatggtgaattcaagttcctgcccccacctggctatgctccatgccatgaggctgtgctccctcgagagcgactccatcttgaacccatcaaggagtatcgacgggaggggccccgggggcctcacctggtgggccccagtcgctgcctctcacacaccgacttcgtgccctgccctgtggacactgtccagattgtcctgccgccccatctggagcgcattcgggagaagctggcggagaacatccacgagctctgggcgctaacccgcatcgagcagggctggacctacggcccggttcgggatgacaacaagaggctgcacccgtgtcttgtggacttccacagccttccagagcctgagaggaactacaacctgcagatgtctggggagacgctcaagactctgctggctctgggctgccacgtgggcatggcggatgagaaggcggaggacaacctgaagaagacaaaactccccaagacgtatatgatgagcaatgggtacaagccggctccgctggacctgagccacgtgcggctgacgccggcgcagacgacactggtggaccgtctggcagaaaatgggcacaacgtgtgggcccgagaccgcgtgggccagggctggagctacagcgcagtgcaggacatcccagcgcgccgaaaccctcggctggtgccctaccgcctgctggatgaagccaccaagcgcagcaaccgggacagcctctgccaggccgtgcgcaccctcctgggctacggctacaacatcgagcctcctgaccaggagcccagtcaggtggagaaccagtctcgttgtgaccgggtgcgcatcttccgggcagagaaatcctatacagtgcagagcggccgctggtacttcgagtttgaagcagtcaccacaggcgagatgcgcgtgggctgggcgaggcccgagctgaggcctgatgtagagctgggagctgacgagctggcctatgtcttcaatgggcaccgcggccagcgctggcacttgggcagtgaaccatttgggcgcccctggcagccgggcgatgtcgttggctgtatgatcgacctcacagagaacaccattatcttcaccctcaatggcgaggtcctcatgtctgactcaggctccgaaacagccttccgggagattgagattggggacggcttcctgcccgtctgcagcttgggacctggccaggtgggtcatctgaacctgggccaggacgtgagctctctgaggttctttgccatctgtggcctccaggaaggcttcgagccatttgccatcaacatgcagcgcccagtcaccacctggttcagcaaaggcctgccccagtttgagccagtgccccttgaacaccctcactatgaggtatcccgagtggacggcactgtggacacgcccccctgcctgcgcctgacccaccgcacctggggctcccagaacagcctggtggagatgcttttcctgcggctgagcctcccagtccagttccaccagcacttccgctgcactgcaggggccaccccgctggcacctcctggcctgcagccccccgccgaggacgaggcccgggcggcggaacccgaccctgactacgaaaacctgcgccgctcagctgggggctggagcgaggcagagaacggcaaagaagggactgcgaaggagggcgcccccgggggcaccccgcaggcggggggagaggcgcagcccgccagggcggagaatgagaaggatgccaccaccgagaagaacaagaagagaggcttcttattcaaggccaagaaggtcgccatgatgacccagccaccggccacccccacgctgccccgactccctcacgacgtggtgcctgcagacaaccgcgatgaccccgagatcatcctcaacaccaccacgtactattactccgtgagggtctttgctggacaggagcccagctgcgtgtgggcgggctgggtcacccctgactaccatcagcacgacatgagcttcgacctcagcaaggtccgggtcgtgacggtgaccatgggggatgaacaaggcaacgtccacagcagcctcaagtgtagcaactgctacatggtgtggggcggagactttgtgagtcccgggcagcagggccggatcagccacacggaccttgtcattgggtgcctggtggacttggccactggcttaatgacctttacagccaatggcaaagagagcaacacctttttccaggtggaacccaacactaagctatttcctgccgtcttcgtcctgcccacccaccagaacgtcatccagtttgagctggggaagcagaagaacatcatgccgttgtcagccgccatgttccaaagcgagcgcaagaacccggccccgcagtgcccaccgcggctggagatgcagatgctgatgccagtgtcctggagccgcatgcccaaccacttcctgcaggtggagacgaggcgtgccggcgagcggctgggctgggccgtgcagtgccaggagccgctgaccatgatggcgctgcacatccccgaggagaaccggtgcatggacatcctggagctgtcggagcgcctggacctgcagcgcttccactcgcacaccctgcgcctctaccgcgctgtgtgcgccctgggcaacaatcgcgtggcgcacgctctgtgcagccacgtagaccaagctcagctgctgcacgccctggaggacgcgcacctgccaggcccactgcgcgcaggctactatgacctcctcatcagcatccacctcgaaagtgcctgccgcagccgccgctccatgctctctgaatacatcgtgcccctcacgcctgagacccgcgccatcacgctcttccctcctggaaggagcacagaaaatggtcacccccggcatggcctgccgggagttggagtcaccacttcgctgaggcccccgcatcatttctcgcccccctgtttcgtggccgctctgccagctgctggggcagcagaggccccggcccgcctcagccctgccatcccgctggaggccctgcgggacaaggcactgaggatgctgggggaggcggtgcgcgacggtgggcagcacgctcgcgaccccgtcgggggctccgtggagttccagtttgtgcctgtgctcaagctcgtgtccaccctgctggtgatgggcatctttggcgatgaggatgtgaaacagatcttgaagatgattgagcctgaggtcttcactgaggaagaagaggaggaggacgaggaggaagagggtgaagaggaagatgaggaggagaaggaggaggatgaggaggaaacagcacaggaaaaggaagatgaggaaaaagaggaagaggaggcagcagaaggggagaaagaagaaggcttggaggaagggctgctccagatgaagttgccagagtctgtgaagttacagatgtgccacctgctggagtatttctgtgaccaagagctgcagcaccgtgtggagtccctggcagcctttgcggagcgctatgtggacaagctccaggccaaccagcggagccgctatggcctcctcataaaagccttcagcatgaccgcagcagagactgcaagacgtacccgcgagttccgctccccaccccaggaacagatcaatatgctattgcaattcaaagatggtacagatgaggaagactgtcctctccctgaagagattcgacaggatttgcttgactttcatcaagacctgctggcacactgtggaattcagctagatggagaggaggaggaaccagaggaagagaccaccctgggcagccgcctcatgagcctgttggagaaagtgcggctggtgaagaagaaggaagagaaacctgaggaggagcggtcagcagaggagagcaaaccccggtccctgcaggagctggtgtcccacatggtggtgcgctgggcccaagaggacttcgtgcagagccccgagctggtgcgggccatgttcagcctcctgcaccggcagtacgacgggctgggtgagctgctgcgtgccctgccgcgggcgtacaccatctcaccgtcctccgtggaagacaccatgagcctgctcgagtgcctcggccagatccgctcgctgctcatcgtgcagatgggcccccaggaggagaacctcatgatccagagcatcgggaacatcatgaacaacaaagtcttctaccaacacccgaacctgatgagggcgctgggcatgcacgagacggtcatggaggtcatggtcaacgtcctcgggggcggcgagtccaaggagatccgcttccccaagatggtgacaagctgctgccgcttcctctgctatttctgccgaatcagccggcagaaccagcgctccatgtttgaccacctgagctacctgctggagaacagtggcatcggcctgggcatgcagggctccacgcccctggacgtggctgctgcctccgtcattgacaacaatgagctggccttggcattgcaggagcaggacctggaaaaggttgtgtcctacctggcaggctgtggcctccagagctgccccatgcttgtggccaaagggtacccagacattggctggaacccctgtggtggagagcgctacctggacttcctgcgctttgctgtcttcgtcaacggcgagagcgtggaggagaacgccaatgtggtggtgcggctgctcatccggaagcctgagtgcttcggacccgccctgcggggtgagggtggctcagggctgctggctgccatcgaagaggccatccgcatctccgaggaccctgcgagggatggcccaggcatccgcagggaccggcggcgcgagcactttggtgaggaaccgcctgaagaaaaccgggtgcacctgggacacgccatcatgtccttctatgccgccttgatcgacctgctcggacgctgtgcaccagagatgcatctaatccaagccggcaagggtgaggccctgcggatccgcgccatcctccgctcccttgtgcccttggaggaccttgtgggcatcatcagcctcccactgcagattcccaccctgggcaaagatggggctctggtgcagccaaagatgtcagcatccttcgtgccggaccacaaggcgtccatggtgctcttcctggaccgtgtgtatggcatcgagaaccaggacttcttgctgcacgtgctggacgtggggttcctgcccgacatgagggcagccgcctcgctggacacggccactttcagcaccaccgagatggcgctggcgctgaaccgctacctgtgcctggccgtgctgccgctcatcaccaagtgtgcgccgctctttgcgggcacagaacaccgcgccatcatggtggactctatgctgcataccgtgtaccgcctgtctcggggtcgttcgctcaccaaggcgcagcgtgacgtcatcgaggactgcctcatgtcgctctgcaggtacatccgcccgtcgatgctgcagcacctgttgcgccgcctggtgttcgacgtgcccatcctcaacgagttcgccaagatgccactcaagctcctcaccaaccactatgagcgctgttggaagtactactgcctacccacgggctgggccaacttcggggtcacctcagaggaggagctgcacctcacacggaaactcttctggggcatctttgactctctggcccataagaaatacgacccggagctgtaccgcatggccatgccttgtctgtgcgccattgccggggctctgccccccgactatgtggatgcctcatactcatctaaggcagagaaaaaggccacagtggatgctgaaggcaactttgatccccggcctgtggagaccctcaatgtgatcatcccggagaagctggactccttcattaacaagtttgcggagtacacacacgagaagtgggccttcgacaagatccagaacaactggtcctatggagagaacatagacgaggagctgaagacccaccccatgctgaggccctacaagaccttttcagagaaggacaaagagatttaccgctggcccatcaaggagtccctgaaggccatgattgcctgggaatggacgatagagaaggccagggagggtgaggaggagaagacggaaaagaaaaaaacgcggaagatatcacaaagtgcccagacctatgatcctcgagaaggctacaaccctcagccccccgaccttagtgctgttaccctgtcccgggagctgcaggccatggcagaacaactggcagaaaattaccacaacacgtggggacggaagaagaagcaggagctggaagccaaaggcggtgggacccaccccctgctggtcccctacgacacgctcacggccaaggagaaggcacgagatcgagagaaggcccaggagctactgaaattcctgcagatgaatggctacgcggttacaagaggccttaaggacatggaactggactcgtcttccattgaaaagcggtttgcctttggcttcctgcagcagctgctgcgctggatggacatttctcaggagttcattgcccacctggaggctgtggtcagcagtgggcgagtggaaaagtccccacatgaacaggagattaaattctttgccaagatcctgctccctttgatcaaccagtacttcaccaaccactgcctctatttcttgtccactccggctaaagtgctgggcagcggtggccacgcctctaacaaggagaaggaaatgatcaccagcctcttctgcaaacttgctgctctcgtccgccaccgagtctctctctttgggacagacgccccagctgtggtcaactgtcttcacatcctggcccgctccctggatgccaggacagtgatgaagtcaggccctgagatcgtgaaggctggcctccgctccttcttcgagagtgcctcggaggacatcgagaagatggtggagaacctgcggctgggcaaggtgtcgcaggcgcgcacccaggtgaaaggcgtgggccagaacctcacctacaccactgtggcactgctgccggtcctcaccaccctcttccagcacatcgcccagcaccagttcggagatgacgtcatcctggacgacgtccaggtctcttgctaccgaacgctgtgcagtatctactccctgggaaccaccaagaacacttatgtggaaaagcttcggccagccctcggggagtgcctggcccgtctggcagcagccatgccggtggcgttcctggagccgcagctgaacgagtacaacgcctgctccgtgtacaccaccaagtctccgcgggagcgggccatcctggggctccccaacagtgtggaggagatgtgtcccgacatcccggtgctggagcggctcatggcagacattggggggctggccgagtcaggtgcccgctacacagagatgccgcatgtcatcgagatcacgctgcccatgctatgcagctacctgccccgatggtgggagcgcgggcccgaggcacccccttccgccctgcccgccggcgcccccccaccctgcacagctgtcacctctgaccacctcaactccctgctggggaatatcctgagaatcatcgtcaacaacctgggcattgacgaggcctcctggatgaagcggctggctgtgttcgcacagcccattgtgagccgtgcacggccggagctcctgcagtcccacttcatcccaactatcgggcggctgcgcaagagggcagggaaggtggtgtccgaggaggagcagctgcgcctggaggccaaggcggaggcccaggagggcgagctgctggtgcgggacgagttctctgtgctctgccgggacctctacgccctgtatccgctgctcatccgctacgtggacaacaacagggcgcagtggctgacggagccgaatcccagcgcggaggagctgttcaggatggtgggcgagatcttcatctactggtccaagtcccacaacttcaagcgcgaggagcagaactttgtggtccagaatgagatcaacaacatgtccttcctgactgctgacaacaaaagcaaaatggctaaggcgggagatatacagtccggtggctcggaccaggaacgcaccaagaagaagcgccggggggaccggtactctgtgcagacgtcactgatcgtggccacactgaagaagatgctgcccatcggcctgaatatgtgtgcgcccaccgaccaagacctcatcacgctggccaagacccgttacgccctgaaagacacagatgaggaggtccgggaatttctgcacaacaaccttcaccttcagggaaaggtcgaaggctccccgtctctgcgctggcagatggctctgtaccggggcgtcccgggtcgcgaggaggacgccgatgaccccgagaaaatcgtgcgcagagtccaggaagtgtcagccgtgctctactacctggaccagaccgagcacccttacaagtctaagaaggccgtgtggcacaagcttttgtccaaacagcgccggcgggcagtcgtggcctgtttccgtatgacgcccctgtacaacctgcccacgcaccgggcatgtaacatgttcctggagagctacaaggctgcatggatcctgactgaagaccacagttttgaggaccgcatgatagatgacctttcaaaagctggggagcaggaggaggaggaggaagaggtggaagagaagaagccagaccccctgcaccagttggtcctgcacttcagccgcactgccctgacggaaaagagcaaactggatgaggattacctgtacatggcctatgctgatatcatggcaaagagctgccacctggaggagggaggggagaacggtgaagctgaagaggaggttgaggtctcctttgaggagaaacagatggagaagcagaggctcttgtaccagcaagcacggctgcacacccggggggcggccgagatggtgctgcagatgatcagtgcctgcaaaggagagacaggtgccatggtgtcctccaccctgaagctgggcatctccatcctcaatggaggcaatgctgaggtccagcagaaaatgctggattatcttaaggacaagaaggaagttggcttcttccagagtatccaggcactgatgcaaacatgcagcgtcctggatctcaatgcctttgagagacagaacaaggccgaggggctgggcatggtgaatgaggatggcactgtcatcaatcgccagaacggagagaaggtcatggcggatgatgaattcacacaagacctgttccgattcctacaattgctctgtgaggggcacaataatgatttccagaactacctacggacacagacagggaacacgaccactattaacatcatcatttgcactgtggactacctcctgcggctgcaggaatccatcagcgacttctactggtactactcgggcaaggatgtcattgaagagcagggcaagaggaacttctccaaagccatgtcggtggctaagcaggtgttcaacagcctcactgagtacatccagggtccctgcaccgggaaccagcagagcctggcgcacagtcgcctatgggacgcagtggtgggattcctgcacgtgttcgcccacatgatgatgaagctcgctcaggactcaagccagatcgagctgctgaaggagctgctggatctgcagaaggacatggtggtgatgttgctgtcgctactagaagggaacgtggtgaacggcatgatcgcccggcagatggtggacatgctcgtggaatcctcatccaatgtggagatgatcctcaagttcttcgacatgttcctgaaactcaaggacattgtgggctctgaagccttccaggactacgtaacggatccccgtggcctcatctccaagaaggacttccagaaggccatggacagccagaagcagttcagcggtccagaaatccagttcctgctttcgtgctccgaagcggatgagaacgaaatgatcaactgcgaagagttcgccaaccgcttccaggagccagcacgcgacatcggcttcaacgtggcggtgctgctgaccaacctgtcggagcatgtgccgcatgaccctcgcctgcacaacttcctggagctggccgagagcatccttgagtacttccgcccctacctgggccgcatcgagatcatgggcgcgtcacgccgcatcgagcgcatctacttcgagatctcagagaccaaccgcgcccagtgggagatgccccaggtgaaggagtccaagcgccagttcatcttcgacgtggtgaacgagggcggcgaggctgagaagatggagctcttcgtgagtttctgcgaggacaccatcttcgagatgcagatcgccgcgcagatctcggagcccgagggcgagccggagaccgacgaggacgagggcgcgggcgcggcggaggcgggcgcggaaggcgcggaggagggcgcggcggggctcgagggcacggcggccacggcggcggcgggggcgacggcgcgggttgtggcggccgcaggccgggccctgcgaggcctcagctaccgcagcctgcggcggcgcgtgcggcggctgcggcggcttacggcccgcgaggcggccaccgcagtggcggcgctgctctgggcagcagtgacgcgcgctggggccgctggcgcgggggcggcggcgggcgcgctgggcctgctctggggctcgctgttcggcggcggcctggtggagggcgccaagaaggtgacggtgaccgagctcctggcaggcatgcccgaccccaccagcgacgaggtgcacggcgagcagccggccgggccgggcggagacgcagacggcgagggtgccagcgagggcgctggagacgccgcggagggcgctggagacgaggaggaggcggtgcacgaggccgggccgggcggtgccgacggggcggtggccgtgaccgatgggggccccttccggcccgaaggggctggcggtctcggggacatgggggacacgacgcctgcggaaccgcccacacccgagggctctcccatcctcaagaggaaattgggggtggatggagtggaggaggagctcccgccagagccagagcccgagccggaaccagagctggagccggagaaagccgatgccgagaatggggagaaggaagaagttcccgagcccacaccagagccccccaagaagcaagcacctccctcaccccctccaaagaaggaggaagctggaggcgaattctggggagaactggaggtgcagagggtgaagttcctgaactacctgtcccggaacttttacaccctgcggttccttgccctcttcttggcatttgccatcaacttcatcttgctgttttataaggtctcagactctccaccaggggaggacgacatggaaggctcagctgctggggatgtgtcaggtgcaggctctggtggcagctctggctggggcttgggggccggagaggaggcagagggcgatgaggatgagaacatggtgtactacttcctggaggaaagcacaggctacatggaacccgccctgcggtgtctgagcctcctgcatacactggtggcctttctctgcatcattggctataattgtctcaaggtgcccctggtaatctttaagcgggagaaggagctggcccggaagctggagtttgatggcctgtacatcacggagcagcctgaggacgatgacgtgaaggggcagtgggaccgactggtgctcaacacgccgtctttccctagcaactactgggacaagtttgtcaagcgcaaggtcctggacaaacatggggacatctacgggcgggagcggattgctgagctactgggcatggacctggccacactagagatcacagcccacaatgagcgcaagcccaacccgccgccagggctgctgacctggctcatgtccatcgatgtcaagtaccagatctggaagttcggggtcatcttcacagacaactccttcctgtacctgggctggtatatggtgatgtccctcttgggacactacaacaacttcttctttgctgcccatctcctggacatcgccatgggggtcaagacgctgcgcaccatcctgtcctctgtcacccacaatgggaaacagctggtgatgaccgtgggccttctggcggtggtcgtctacctgtacaccgtggtggccttcaacttcttccgcaagttctacaacaagagcgaggatgaggatgaacctgacatgaagtgtgatgacatgatgacgtgttacctgtttcacatgtacgtgggtgtccgggctggcggaggcattggggacgagatcgaggaccccgcgggtgacgaatacgagctctacagggtggtcttcgacatcaccttcttcttcttcgtcatcgtcatcctgttggccatcatccagggtctgatcatcgacgcttttggtgagctccgagaccaacaagagcaagtgaaggaggatatggagaccaagtgcttcatctgtggaatcggcagtgactactttgatacgacaccgcatggcttcgagactcacacgctggaggagcacaacctggccaattacatgtttttcctgatgtatttgataaacaaggatgagacagaacacacgggtcaggagtcttatgtctggaagatgtaccaagagagatgttgggatttcttcccagctggtgattgtttccgtaagcagtatgaggaccagcttagctgacacacccccagctggccctccacccccacctcaagtgccttattctcacagcaagccccttagtccccaagcccctccccctaaggcagctgggggagaggtgacctagtac

SEQ ID NO: 5404 - DNA, 862 bp, Homo sapiens
ggaaagcgtggcggctgctgctagagcctttccctttaccgcacccaaggagctggagcgacaacaacgacgtcgtttccgtttccaccacctcttcctgttcccgtccttgaggacgccgtgccgggtcagtgttagcctccagccctggttgtggaaggcgacagaagtcatggcgatgtttgagcagatgagagccaacgtgggcaagttgctcaagggtatcgacaggtacaatcctgagaacctggccaccctggagcgctatgtagagacgcaggccaaggaaaatgcctatgatctggaagccaacctggctgtcctgaagctgtaccagttcaacccagccttctttcagaccacggtcaccgcccagatcctgctgaaggccctcaccaacttgccgcacacagacttcaccctgtgcaagtgcatgatcgaccaggcacatcaagaagaacggccaatccgacagattttgtacctcggggacctgctggagacctgccatttccaggccttctggcaagccctggatgaaaacatggacctcttggaaggtataactggctttgaagactctgtccgaaagtttatctgccatgttgtgggtatcacttaccagcacattgaccgctggctgctggccgagatgctcggggatctgtcggacagccagctaaaggtgtggatgagcaaatacggctggagtgccgacgagtcggggcagatcttcatctgtagccaagaagagagcattaaacccaagaacattgtggagaagattgactttgacagtgtgtccagcatcatggcctcctcccagtaacttcaggtgtttaataaagatgtgttgactcag

SEQ ID NO: 5405 - protein, 218 aa, Homo sapiens
MAMFEQMRANVGKLLKGIDRYNPENLATLERYVETQAKENAYDLEANLAVLKLYQFNPAFFQTTVTAQILLKALTNLPHTDFTLCKCMIDQAHQEERPIRQILYLGDLLETCHFQAFWQALDENMDLLEGITGFEDSVRKFICHVVGITYQHIDRWLLAEMLGDLSDSQLKVWMSKYGWSADESGQIFICSQEESIKPKNIVEKIDFDSVSSIMASSQ

SEQ ID NO: 5406 - DNA, 483 bp, Homo sapiens
cccggtcccagccatgtccaacgtcccccacaagtcctcactgcccgagggcatccgccctggcacggtgctgagaattcgcggcttggttcctcccaatgccagcaggttccatgtaaacctgctgtgcggggaggagcagggctccgatgccgccctgcatttcaacccccggctggacacgtcggaggtggtcttcaacagcaaggagcaaggctcctggggccgcgaggagcgcgggccgggcgttcctttccagcgcgggcagcccttcgaggtgctcatcatcgcgtcagacgacggcttcaaggccgtggttggggacgcccagtaccaccacttccgccaccgcctgccgctggcgcgcgtgcgcctggtggaggtgggcggggacgtgcagctggactccgtgaggatcttctgagcagaagcccaggcgggcccggggccttggctggcaaataaagcgttagcccgcagcgc

SEQ ID NO: 5407 - protein, 136 aa, Homo sapiens
MSNVPHKSSLPEGIRPGTVLRIRGLVPPNASRFHVNLLCGEEQGSDAALHFNPRLDTSEVVFNSKEQGSWGREERGPGVPFQRGQPFEVLIIASDDGFKAVVGDAQYHHFRHRLPLARVRLVEVGGDVQLDSVRIF

SEQ ID NO: 5408 - DNA, 483 bp, Homo sapiens; identical to SEQ ID NO: 5406

SEQ ID NO: 5409 - DNA, 1963 bp, Homo sapiens
gtgttgtacgaaagcgcgtctgcggccgcaatgtctgctgagagttgtagttctgtgccctatcacggccactcccatttctggtgccgtcacgggacagagcagtcggtgacaggacagagcagtcggtgacgggacacagtggttggtgacgggacagagcggtcggtgacagcctcaagggcttcagcaccgcgcccatggcagagccagacccctctcaccctctggagacccaggcagggaaggtgcaggaggctcaggactcagattcagactctgagggaggagccgctggtggagaagcagacatggacttcctgcggaacttattctcccagacgctcagcctgggcagccagaaggagcgtctgctggacgagctgaccttggaaggggtggcccggtacatgcagagcgaacgctgtcgcagagtcatctgtttggtgggagctggaatctccacatccgcaggcatccccgactttcgctctccatccaccggcctctatgacaacctagagaagtaccatcttccctacccagaggccatctttgagatcagctatttcaagaaacatccggaacccttcttcgccctcgccaaggaactctatcctgggcagttcaagccaaccatctgtcactacttcatgcgcctgctgaaggacaaggggctactcctgcgctgctacacgcagaacatagataccctggagcgaatagccgggctggaacaggaggacttggtggaggcgcacggcaccttctacacatcacactgcgtcagcgccagctgccggcacgaatacccgctaagctggatgaaagagaagatcttctctgaggtgacgcccaagtgtgaagactgtcagagcctggtgaagcctgatatcgtcttttttggtgagagcctcccagcgcgtttcttctcctgtatgcagtcagacttcctgaaggtggacctcctcctggtcatgggtacctccttgcaggtgcagccctttgcctccctcatcagcaaggcacccctctccacccctcgcctgctcatcaacaaggagaaagctggccagtcggaccctttcctggggatgattatgggcctcggaggaggcatggactttgactccaagaaggcctacagggacgtggcctggctgggtgaatgcgaccagggctgcctggcccttgctgagctccttggatggaagaaggagctggaggaccttgtccggagggagcacgccagcatagatgcccagtcgggggcgggggtccccaaccccagcacttcagcttcccccaagaagtccccgccacctgccaaggacgaggccaggacaacagagagggagaaaccccagtgacagctgcatctcccaggcgggatgccgagctcctcagggacagctgagccccaaccgggcctggccccctcttaaccagcagttcttgtctggggagctcagaacatcccccaatctcttacagctccctccccaaaactggggtcccagcaaccctggcccccaaccccagcaaatctctaacacctcctagaggccaaggcttaaacaggcatctctaccagccccactgtctctaaccactcctgggctaaggagtaacctccctcatctctaactgcccccacggggccagggctaccccagaacttttaactcttccaggacagggagcttcgggcccccactctgtctcctgcccccgggggcctgtggctaagtaaaccatacctaacctaccccagtgtgggtgtgggcctctgaatataacccacacccagcgtagggggagtctgagccgggagggctcccgagtctctgccttcagctcccaaagtgggtggtgggcccccttcacgtgggacccacttcccatgctggatgggcagaagacattgcttattggagacaaattaaaaacaaaaacaactaac

SEQ ID NO: 5410 - protein, 389 aa, Homo sapiens
MAEPDPSHPLETQAGKVQEAQDSDSDSEGGAAGGEADMDFLRNLFSQTLSLGSQKERLLDELTLEGVARYMQSERCRRVICLVGAGISTSAGIPDFRSPSTGLYDNLEKYHLPYPEAIFEISYFKKHPEPFFALAKELYPGQFKPTICHYFMRLLKDKGLLLRCYTQNIDTLERIAGLEQEDLVEAHGTFYTSHCVSASCRHEYPLSWMKEKIFSEVTPKCEDCQSLVKPDIVFFGESLPARFFSCMQSDFLKVDLLLVMGTSLQVQPFASLISKAPLSTPRLLINKEKAGQSDPFLGMIMGLGGGMDFDSKKAYRDVAWLGECDQGCLALAELLGWKKELEDLVRREHASIDAQSGAGVPNPSTSASPKKSPPPAKDEARTTEREKPQ

SEQ ID NO: 5411 - DNA, 1931 bp, Homo sapiens
cgaaagcgcgtctgcggccgcaatgtctgctgagagttgtagttctgtgccctatcacggccactcccatttctggtgccgtcacgggacagagcagtcggtgacaggacagagcagtcggtgacgggacacagtggttggtgacgggacagagcggtcggtgacagcctcaagggcttcagcaccgcgcccatggcagagccagaccgactcagattcagactctgagggaggagccgctggtggagaagcagacatggacttcctgcggaacttattctcccagacgctcagcctgggcagccagaaggagcgtctgctggacgagctgaccttggaaggggtggcccggtacatgcagagcgaacgctgtcgcagagtcatctgtttggtgggagctggaatctccacatccgcaggcatccccgactttcgctctccatccaccggcctctatgacaacctagagaagtaccatcttccctacccagaggccatctttgagatcagctatttcaagaaacatccggaacccttcttcgccctcgccaaggaactctatcctgggcagttcaagccaaccatctgtcactacttcatgcgcctgctgaaggacaaggggctactcctgcgctgctacacgcagaacatagataccctggagcgaatagccgggctggaacaggaggacttggtggaggcgcacggcaccttctacacatcacactgcgtcagcgccagctgccggcacgaatacccgctaagctggatgaaagagaagatcttctctgaggtgacgcccaagtgtgaagactgtcagagcctggtgaagcctgatatcgtcttttttggtgagagcctcccagcgcgtttcttctcctgtatgcagtcagacttcctgaaggtggacctcctcctggtcatgggtacctccttgcaggtgcagccctttgcctccctcatcagcaaggcacccctctccacccctcgcctgctcatcaacaaggagaaagctggccagtcggaccctttcctggggatgattatgggcctcggaggaggcatggactttgactccaagaaggcctacagggacgtggcctggctgggtgaatgcgaccagggctgcctggcccttgctgagctccttggatggaagaaggagctggaggaccttgtccggagggagcacgccagcatagatgcccagtcgggggcgggggtccccaaccccagcacttcagcttcccccaagaagtccccgccacctgccaaggacgaggccaggacaacagagagggagaaaccccagtgacagctgcatctcccaggcgggatgccgagctcctcagggacagctgagccccaaccgggcctggccccctcttaaccagcagttcttgtctggggagctcagaacatcccccaatctcttacagctccctccccaaaactggggtcccagcaaccctggcccccaaccccagcaaatctctaacacctcctagaggccaaggcttaaacaggcatctctaccagccccactgtctctaaccactcctgggctaaggagtaacctccctcatctctaactgcccccacggggccagggctaccccagaacttttaactcttccaggacagggagcttcgggcccccactctgtctcctgcccccgggggcctgtggctaagtaaaccatacctaacctaccccagtgtgggtgtgggcctctgaatataacccacacccagcgtagggggagtctgagccgggagggctcccgagtctctgccttcagctcccaaagtgggtggtgggcccccttcacgtgggacccacttcccatgctggatgggcagaagacattgcttattggagacaaattaaaaacaaaaacaactaacaaaaaaaaaaaaaaaaaaaaaaa

SEQ ID NO: 5412 - protein, 352 aa, Homo sapiens
MDFLRNLFSQTLSLGSQKERLLDELTLEGVARYMQSERCRRVICLVGAGISTSAGIPDFRSPSTGLYDNLEKYHLPYPEAIFEISYFKKHPEPFFALAKELYPGQFKPTICHYFMRLLKDKGLLLRCYTQNIDTLERIAGLEQEDLVEAHGTFYTSHCVSASCRHEYPLSWMKEKIFSEVTPKCEDCQSLVKPDIVFFGESLPARFFSCMQSDFLKVDLLLVMGTSLQVQPFASLISKAPLSTPRLLINKEKAGQSDPFLGMIMGLGGGMDFDSKKAYRDVAWLGECDQGCLALAELLGWKKELEDLVRREHASIDAQSGAGVPNPSTSASPKKSPPPAKDEARTTEREKPQ

SEQ ID NO: 5413 - DNA, 2067 bp, Homo sapiens
tgaagaggcgggacacagacgacgattgggcgacgaaggactctatcgcggtcaactttcctcaggatctgattggctcgtcacggtcaggttcgctgccttgcaattggtctaaacgcggagtgggcgggacgaagtgccgccttgtccccggtccaagatggctgcgtccatggcgcggcgcttgtggcctttgctgactcgtcgggggttccggccccggggaggctgcatctccaacgatagtccaaggagaagtttcactacagagaaacgaaaccggaacctcctgtacgagtatgcgcgcgagggctacagcgcactccctcagctggacatagagcggttctgcgcatgcccagaagaggccgcacacgccctggagctccgcaagggggagctgcgctcggcggacctgcccgcgatcatctcgacatggcaggagctgaggcagctgcaggagcagatccggagcctggaggaagagaaggcagctgtgactgaggcagtgcgggccctgctggcaaaccaggacagtggtgaagtgcagcaggaccccaagtaccagggtctgcgggcacgtggccgggagatccggaaggagcttgttcacctgtaccccagggaggcccagcttgaggagcagttctacctgcaggcgctgaagctgcccaaccagacccacccagacgtgcccgtcggggatgagagccaggctcgagtgctccacatggtcggagacaagccagttttctccttccaacctcggggccacctggaaattggcgagaaactcgacatcatccgtcagaagcgcctgtcccacgtgtctggccaccggtcctattacctgcgcggggctggagccctcctgcagcacggcctggtcaacttcacattcaacaagcttctccgccggggcttcacccccatgacggtgccagaccttctccgcggagcagtgtttgaaggctgtgggatgacaccaaatgccaacccatcccaaatttacaacatcgaccctgcccgcttcaaagatctcaacctggctggaacagcggaggtggggcttgcaggctacttcatggaccacaccgtggccttcagggacctgccagtcaggatggtttgctccagcacctgctaccgggcagagacaaacacgggacaggaaccccgggggctgtatcgagtacaccacttcaccaaggtggagatgtttggggtgacaggccctgggctggagcagagctcacagctgctggaggagttcctgtcccttcagatggagatcttgacagagctgggcttgcacttccgggtcctggatatgcccacccaagaactgggcctccccgcctaccgcaagtttgacattgaggcctggatgccaggccgaggccgctttggagaggtcaccagtgcttccaactgcacagacttccagagccgccgcctccacatcatgttccagaccgaggctggggagctgcagtttgcccacacggtgaacgccaccgcctgtgctgtcccccgccttctcatcgcgctcctggagagtaaccagcagaaggacggctcagtgctcgtgccccctgccctccagtcctacctcggcactgatcggatcacagcccctacccacgtgcctctccagtacatcggccccaaccagccccggaagcctgggctgcctggccagcctgctgtaagctaagaacccacccacagcagccctcgggggtgtcactgcttcctggagttcaggagaccccggacacctgggacctgtgttgctgagcccgtcctgacatctgtgttcttcctgtcagctccacgcccgggcccctggaccacggggtccacctctcctctgtccttgctgcctcagagtcagtcactgaccctgttatcattgagggtcccagtgggaagcaggacgtctgggctttacggttctagggacaggagaagcagaggaagaggcttccatccctccttccttctttcctcctacagtgctgagcaaaaagtccccaataaatggtcaggacaaaaaaaaaaaaa

SEQ ID NO: 5414 - protein, 518 aa, Homo sapiens
MAASMARRLWPLLTRRGFRPRGGCISNDSPRRSFTTEKRNRNLLYEYAREGYSALPQLDIERFCACPEEAAHALELRKGELRSADLPAIISTWQELRQLQEQIRSLEEEKAAVTEAVRALLANQDSGEVQQDPKYQGLRARGREIRKELVHLYPREAQLEEQFYLQALKLPNQTHPDVPVGDESQARVLHMVGDKPVFSFQPRGHLEIGEKLDIIRQKRLSHVSGHRSYYLRGAGALLQHGLVNFTFNKLLRRGFTPMTVPDLLRGAVFEGCGMTPNANPSQIYNIDPARFKDLNLAGTAEVGLAGYFMDHTVAFRDLPVRMVCSSTCYRAETNTGQEPRGLYRVHHFTKVEMFGVTGPGLEQSSQLLEEFLSLQMEILTELGLHFRVLDMPTQELGLPAYRKFDIEAWMPGRGRFGEVTSASNCTDFQSRRLHIMFQTEAGELQFAHTVNATACAVPRLLIALLESNQQKDGSVLVPPALQSYLGTDRITAPTHVPLQYIGPNQPRKPGLPGQPAVS

SEQ ID NO: 5415 - DNA, 1094 bp, Homo sapiens
agctggattcagcgtgtccgcgacctcacctttaggtcctgtgaggtcggtggaatcctggggtcctccaaatctaccaggccatctccccagtttcccagttcttcctgcgtgcgggcgagagtggttgggccctcgggaacccactcagagcgaggctaaatttacggagggactttctgttagcagcatgagggcctgtggttagacctatagaggtatttcctttgatttaagccagaaagtcctgagagcggatcggggagcatttgcggatcggtcactttttcctcctttctgagtctcttatcccctaccacagggacggcccaggtggcaggatgtcctggtctggccttctccatggcctcaacacgtccctaacttgtggcccagctctggttccccggctctgggctacctgctccatggctaccctgaaccagatgcaccgcctggggccccccaagcggccgcctcggaagctgggccccacggaaggccggccgcagctgaagggtgtggtcctgtgcacgtttacccgcaagccgaagaagcccaactcagccaatcgcaagtgctgtcgagtgcggctcagcactggccgcgaggccgtctgcttcatccctggggagggccacaccctgcaggagcaccagattgtccttgtggagggcggccgcacccaggacctgccaggcgtcaagctcaccgttgtgcgtggcaagtacgactgtggccacgtgcagaagaagtgacggctgggggcacagtgggctgggcgcccctgcagaacatgaaccttccgctcctggctgccacagggtcctccgatgctggcctttgcgcctctagaggcagccactcatggattcaagtcctggctccgcctcttccatcaggaccactattaagccataggagtcctgggggtgcaaagggtgcccctctgtcaacacccttggctcctgtgtttagaggggtggcctgaaggaccttttctgctgggacaagacactgtactgccctctgctgggaaggggttttaataaacagaccctggcgcttgtgatgtaaaaaaaaaaaaaaaaaaa

SEQ ID NO: 5416 - protein, 138 aa, Homo sapiens
MSWSGLLHGLNTSLTCGPALVPRLWATCSMATLNQMHRLGPPKRPPRKLGPTEGRPQLKGVVLCTFTRKPKKPNSANRKCCRVRLSTGREAVCFIPGEGHTLQEHQIVLVEGGRTQDLPGVKLTVVRGKYDCGHVQKK

SEQ ID NO: 5417 - DNA, 991 bp, Homo sapiens
agctggattcagcgtgtccgcgacctcacctttaggtcctgtgaggtcggtggaatcctggggtcctccaaatctaccaggccatctccccagtttcccagttcttcctgcgtgcgggcgagagtggttgggccctcgggaacccactcagagcgaggctaaatttacggagggactttctgttagcagcatgagggcctgtggttagacctatagagggacggcccaggtggcaggatgtcctggtctggccttctccatggcctcaacacgtccctaacttgtggcccagctctggttccccggctctgggctacctgctccatggctaccctgaaccagatgcaccgcctggggccccccaagcggccgcctcggaagctgggccccacggaaggccggccgcagctgaagggtgtggtcctgtgcacgtttacccgcaagccgaagaagcccaactcagccaatcgcaagtgctgtcgagtgcggctcagcactggccgcgaggccgtctgcttcatccctggggagggccacaccctgcaggagcaccagattgtccttgtggagggcggccgcacccaggacctgccaggcgtcaagctcaccgttgtgcgtggcaagtacgactgtggccacgtgcagaagaagtgacggctgggggcacagtgggctgggcgcccctgcagaacatgaaccttccgctcctggctgccacagggtcctccgatgctggcctttgcgcctctagaggcagccactcatggattcaagtcctggctccgcctcttccatcaggaccactattaagccataggagtcctgggggtgcaaagggtgcccctctgtcaacacccttggctcctgtgtttagaggggtggcctgaaggaccttttctgctgggacaagacactgtactgccctctgctgggaaggggttttaataaacagaccctggcgcttgtgatgtaaaaaaaaaaaaaaaaaaaa

SEQ ID NO: 5418 - protein, 138 aa, Homo sapiens; identical to SEQ ID NO: 5416

SEQ ID NO: 5419 - DNA, 2320 bp, Homo sapiens
ggggagcttgcggcacagctagggcatcccggcgaggagcgccgccaggccccgggccacagccgggcctggcggggggaccatgggcgcctcggtctccaggggccgggccgcccgggtccccgcgccggagccggaacccgaagaggcgctggacctgagccaactacccccagagctgcttctggtggtgctgagccacgtccccccgcgcacgctgctcgggcgctgccgccaagtgtgccggggctggcgagccctggtggacggccaggccctgtggctgctgatcctggcccgcgaccacggcgccaccggccgcgcgctgctgcacctcgcccgcagctgccagtctcccgcccgtaacgccaggccttgccccctgggccgcttctgcgcgcgcagacccatcggacgcaaccttattcgcaacccctgcggccaagaaggcctccgaaagtggatggtgcaacacggtggggacggctgggtggtggaggaaaacaggacaaccgtgcctggggccccttctcagacgtgcttcgtgacttcattcagctggtgttgcaagaagcaggtcttggacctagaggaggagggtctgtggccagaactgctggatagtggcaggattgagatttgtgtctctgactggtggggagcccgacacgacagcggctgtatgtacagactcctcgtccaacttctagacgccaaccagactgttctagataaattctctgctgtgcctgatcccatcccgcagtggaacaacaatgcctgccttcacgtcacccacgtgttctccaacatcaagatgggcgtccgctttgtgtctttcgaacaccggggccaggacacacagttctgggctggccactatggagcccgtgtgaccaactccagtgtgatcgtgcgagtccgtctgtcctagtccagcactacccttcttgcaagacagcctgactgtgccttccagggcctgggaccattggctgggacccctcattaaccaaccaagcacttgtacctccctggcatactgagaattcctgggtccaatcaaaggccctgacgggccctgtcttcaggttctagaaactaccagaagaagcttcttccatcttatctacctactgcagctgctgctttgcgggggggccctactgtactgaggggaaacccacaagtgagcatgggggaatgcccatcctggagaagaattcttgccctcccctctcttctcctcccaaccaaaaccctccgatccagccccaggcccctctgtaccatcccctcccctccgcaccactgacctcttgtctcctgttgtttctgccacagggacttccttggtcccttcagggaagccctcaactcatctctgaacttagaatctcatccttagggctcagagagtcccagccctaagggtgtgaacctcacctcctggggcttccgagctacagggctgggaccaggtcatgcagctgaaagtctacgttaaaaaaaaaaagtttgggccaggcacagtggctcatgcctgtaatcccagcactttgggaggctgaggcaggcggatcacctgaggtcaggagttcaagaccagcctggccaacatggtgaaaccccgtctctactaaaaatccaaaaaattagccgggcttggtggtgtgcacctgtaattccagctactcgggaggctgaggcaggagaattgcttgagcccgggaggcagaggctgcagtgaaccaagatcatgccactgcactccagcctgggcaacacagcgagactccgtctcaaaaagaaaaagtttggatcaggcagggtggctcacacctgtaatccctgcactttgggaggccaaggtgggaggatcagttgagccccagagttcaagaccagcctgggcaatgtagtaagacccccatcgctacaaaaaatacaaaagttagccaggtacagtagtacacacctgtagtccaagctacttgggaggctgaagtgggaggatcatttgtgcccaggttgaggctatagtgagccatgatcataccactgcactccagcctgggtgacagagcgagaccctgtctcaaaaaaaaaaaagaatttggagatggttctgcccactctggtttctctgaaaaaacgaggtaattccctgagcccaaccctgatcctcaaggacctgtaattgtgtggtatttaaaattaaaataacattatttttattttgactttttttcaaacagtaagaataatatatcagcagcatgtatctgccaatcatatgtaataaatttcttattttgcc

SEQ ID NO: 5420 - protein, 283 aa, Homo sapiens
MGASVSRGRAARVPAPEPEPEEALDLSQLPPELLLVVLSHVPPRTLLGRCRQVCRGWRALVDGQALWLLILARDHGATGRALLHLARSCQSPARNARPCPLGRFCARRPIGRNLIRNPCGQEGLRKWMVQHGGDGWVVEENRTTVPGAPSQTCFVTSFSWCCKKQVLDLEEEGLWPELLDSGRIEICVSDWWGARHDSGCMYRLLVQLLDANQTVLDKFSAVPDPIPQWNNNACLHVTHVFSNIKMGVRFVSFEHRGQDTQFWAGHYGARVTNSSVIVRVRLS

SEQ ID NO: 5421 - DNA, 2838 bp, Homo sapiens
ccagtgtggtggaattcgtccgcggtggtggcggtgcaagagagctgagggaggcgcgagggcgcggagttccaggtcgagcagttaggccgcgagcgactgcggcgccgagccgatgagtaacccgaagcccctagaggagtggtcacctgcctgagggcacttctgtcccaccagcatcagaccaggccgcaccgagtccccggcaccatgtttgggaagaggaagaagcgggtggagatctccgcgccgtccaacttcgagcaccgcgtgcacacgggcttcgaccagcacgagcagaagttcacggggctgccccgccagtggcagagcctgatcgaggagtcggctcgccggcccaagcccctcgtcgaccccgcctgcatcacctccatccagcccggggcccccaagaccatcgtgcggggcagcaaaggtgccaaagatggggccctcacgctgctgctggacgagtttgagaacatgtcggtgacacgctccaactccctgcggagagacagcccgccgccgcccgcccgtgcccgccaggaaaatgggatgccagaggagccggccaccacggccagagggggcccagggaaggcaggcagccgaggccggttcgccggtcacagcgaggcgggtggcggcagtggtgacaggcgacgggcggggccagagaagaggcccaagtcttccagggagggctcagggggtccccaggagtcctcccgggacaaacgccccctctccgggcctgatgtcggcaccccccagcctgctggtctggccagtggggcgaaactggcagctggccggccctttaacacctacccgagggctgacacggaccacccatcccggggtgcccagggggagcctcatgacgtggcccctaacgggccatcagcggggggcctggccatcccccagtcctcctcctcctcctcccggcctcccacccgagcccgaggtgcccccagccctggagtgctgggaccccacgcctcagagccccagctggcccctccagcctgcacccccgccgcccctgctgttcctgggccccctggcccccgctcaccacagcgggagccacagcgagtatcccatgagcagttccgggctgccctgcagctggtggtggacccaggcgacccccgctcctacctggacaacttcatcaagattggcgagggctccacgggcatcgtgtgcatcgccaccgtgcgcagctcgggcaagctggtggccgtcaagaagatggacctgcgcaagcagcagaggcgcgagctgctcttcaacgaggtggtaatcatgagggactaccagcacgagaatgtggtggagatgtacaacagctacctggtgggggacgagctctgggtggtcatggagttcctggaaggaggcgccctcaccgacatcgtcacccacaccaggatgaacgaggagcagatcgcggccgtgtgccttgcagtgctgcaggccctgtcggtgctccacgcccagggcgtcatccaccgggacatcaagagcgactcgatcctgctgacccatgatggcagggtgaagctgtcagactttgggttctgcgcccaggtgagcaaggaagtgccccgaaggaagtcgctggtcggcacgccctactggatggccccagagctcatctcccgccttccctacgggccagaggtagacatctggtcgctggggataatggtgattgagatggtggacggagagcccccctacttcaacgagccacccctcaaagccatgaagatgattcgggacaacctgccaccccgactgaagaacctgcacaaggtgtcgccatccctgaagggcttcctggaccgcctgctggtgcgagaccctgcccagcgggccacggcagccgagctgctgaagcacccattcctggccaaggcagggccgcctgccagcatcgtgcccctcatgcgccagaaccgcaccagatgaggcccagcgcccttcccctcaaccaaagagccccccgggtcacccccgccccactgaggccagtagggggccaggcctcccactcctcccagcccgggagatgctccgcgtggcaccaccctccttgctgggggtagatgagaccctactactgaactccagttttgatctcgtgacttttagaaaaacacagggactcgtgggagcaagcgaggctcccaggacccccaccctctgggacaggccctcccccatgttcttctgtctccaggaagggcagcggccctcccatcactggaagtctgcagtgggggtcgctgggggtggagagaacactaagaggtgaacatgtatgagtgtgtgcacgcgtgtgagtgtgcatgtgtgtgtgtgtgcaaaggtccagccaccccgtcctccagcccgcaaggggtgtctggcgccttgcctgacacccagccccctctccccctgagccattgtgggggtcgatcatgaatgtccgaagagtggccttttcccgtagccctgcgccccctttctgtggctggatggggagacaggtcagggccccccaccctctccagcccctgcagcaaatgactactgcacctggacagcctcctcttttctagaagtctatttatattgtcattttataacactctagcccctgcccttattgggggacagatggtccctgtcctgcggggtggccctggcagaaccactgcctgaagaaccaggttcctgcccggtcagcgcagccccagcccgcccacccctgcctcgagttagttttacaattaaaacattgtcttgtttaaaaaaaaaaaaaaaaaaaaaaaaaaa

SEQ ID NO: 5422 - protein, 591 aa, Homo sapiens
MFGKRKKRVEISAPSNFEHRVHTGFDQHEQKFTGLPRQWQSLIEESARRPKPLVDPACITSIQPGAPKTIVRGSKGAKDGALTLLLDEFENMSVTRSNSLRRDSPPPPARARQENGMPEEPATTARGGPGKAGSRGRFAGHSEAGGGSGDRRRAGPEKRPKSSREGSGGPQESSRDKRPLSGPDVGTPQPAGLASGAKLAAGRPFNTYPRADTDHPSRGAQGEPHDVAPNGPSAGGLAIPQSSSSSSRPPTRARGAPSPGVLGPHASEPQLAPPACTPAAPAVPGPPGPRSPQREPQRVSHEQFRAALQLVVDPGDPRSYLDNFIKIGEGSTGIVCIATVRSSGKLVAVKKMDLRKQQRRELLFNEVVIMRDYQHENVVEMYNSYLVGDELWVVMEFLEGGALTDIVTHTRMNEEQIAAVCLAVLQALSVLHAQGVIHRDIKSDSILLTHDGRVKLSDFGFCAQVSKEVPRRKSLVGTPYWMAPELISRLPYGPEVDIWSLGIMVIEMVDGEPPYFNEPPLKAMKMIRDNLPPRLKNLHKVSPSLKGFLDRLLVRDPAQRATAAELLKHPFLAKAGPPASIVPLMRQNRTR

SEQ ID NO: 5423 - DNA, 1963 bp, Homo sapiens
agttggtggaaccggagcttcgagtccgtccccggtgctgcctgcgcgttcacctgagtctcgctggagctcttctcgcccgcccacctcatctcaacccactttccgcggggagcggcgccaagctgggccttcctcggatcaggcgtcccctgaagtcggcacgcccctctgcgtcccccttcggtcccgctaggaccccgtccgggctgccgtcgcctcgtcgctatggcgcccaccatccagacccaggcccagcgggaggatggccacaggcccaattcccaccggactctgcctgagaggtctggagtggtctgccgagtcaagtactgcaatagcctccctgatatccccttcgaccccaagttcatcacctaccccttcgaccagaacaggttcgtccagtacaaagccacttccttggagaaacagcacaaacatgacctcctgactgagccagacctgggggtcaccatcgatctcatcaatcctgacacctaccgcatcgaccccaatgttcttctagatccagctgatgagaaacttttggaagaggagattcaggcccccaccagctccaagagatcccagcagcacgcgaaggtggtgccatggatgcgaaagacagagtacatctccactgagttcaaccgttatggcatctccaatgagaagcctgaggtcaagattggggtttctgtgaagcagcagtttaccgaggaagaaatatacaaagacagggatagccagatcacagccattgagaagacttttgaggatgcccagaaatcaatctcacagcattacagcaaaccccgagtcacaccggtggaggtcatgcctgtcttcccagactttaagatgtggatcaatccatgtgctcaggtgatctttgactcagacccagcccccaaggacacgagtggtgcagctgcgttggagatgatgtctcaggccatgattaggggcatgatggatgaggaagggaaccagtttgtggcctatttcctgcctgtagaagagacgttgaagaaacgaaagcgggaccaggaggaggagatggactatgcaccagatgatgtgtatgactacaaaattgctcgggagtacaactggaacgtgaagaacaaagctagcaagggctatgaggaaaactacttcttcatcttccgagagggtgacggggtttactacaatgagttggaaaccagggtccgccttagtaagcgccgggccaaggctggggttcagtcaggcaccaacgccctgcttgtggtcaaacatcgggacatgaatgagaaggaactggaagctcaggaggcacggaaggcccagctagaaaaccacgaaccggaggaggaagaggaagaggagatggagacagaagagaaagaagctgggggctcagatgaggagcaggagaagggcagcagcagtgagaaggagggcagtgaagatgagcactcgggcagcgagagtgaacgggaggaaggtgacagggacgaggccagtgacaagagtggcagtggtgaggacgagagcagcgaggatgaggcccgggctgcccgtgacaaagaggagatctttggcagtgatgctgattctgaggacgatgccgactctgatgatgaggacagaggacaggcccaaggtggcagtgacaatgattcagacagcggcagcaatgggggtggccagcggagccggagccacagccgcagcgccagtcccttccccagtggcagcgagcactcggcccaggaggatggcagtgaagctgcagcttctgattccagtgaagctgatagtgacagtgactgagtcccagggcattcagggctggttcagacaccattattgtgagcagcaaagcacttttctagtggtctgtttgtgagcctttcacttgtttgttccccacccccaaacctttgctgttaataaagtcaacttctcttta

SEQ ID NO: 5424 - protein, 531 aa, Homo sapiens
MAPTIQTQAQREDGHRPNSHRTLPERSGVVCRVKYCNSLPDIPFDPKFITYPFDQNRFVQYKATSLEKQHKHDLLTEPDLGVTIDLINPDTYRIDPNVLLDPADEKLLEEEIQAPTSSKRSQQHAKVVPWMRKTEYISTEFNRYGISNEKPEVKIGVSVKQQFTEEEIYKDRDSQITAIEKTFEDAQKSISQHYSKPRVTPVEVMPVFPDFKMWINPCAQVIFDSDPAPKDTSGAAALEMMSQAMIRGMMDEEGNQFVAYFLPVEETLKKRKRDQEEEMDYAPDDVYDYKIAREYNWNVKNKASKGYEENYFFIFREGDGVYYNELETRVRLSKRRAKAGVQSGTNALLVVKHRDMNEKELEAQEARKAQLENHEPEEEEEEEMETEEKEAGGSDEEQEKGSSSEKEGSEDEHSGSESEREEGDRDEASDKSGSGEDESSEDEARAARDKEEIFGSDADSEDDADSDDEDRGQAQGGSDNDSDSGSNGGGQRSRSHSRSASPFPSGSEHSAQEDGSEAAASDSSEADSDSD

SEQ ID NO: 5425 - DNA, 893 bp, Homo sapiens
aggcccagcgggaggatggccacaggtctggagtggtctgccgagtcaagtactgcaatagcctccctgatatccccttcgaccccaagttcatcacctaccccttcgaccagaacaggttcgtccagtacaaagccacttccttggagaaacagcacaaacatgacctcctgactgagccagacctgggggtcaccatcgatctcatcaatcctgacacctaccgcatcgaccccaatgttcttctagatccagctgatgagaaacttttggaagaggagattcaggcccccaccagctccaagagatcccagcagcacgcgaaggtggtgccatggatgcgaaagacagagtacatctccactgagttcaaccgttatggcatctccaatgagaagcctgaggtcaagattggggtttctgtgaagcagcagtttaccgaggaagaaatatacaaagacagggatagccagatcacagccattgagaagacttttgaggatgcccagaaatcaatctcacagcattacagcaaaccccgagtcacaccggtggaggtcatgcctgtcttcccagactttaagatgtggatcaatccatgtgctcaggtgatctttgactcagacccagcccccaaggacacgagtggtgcagctgcgttggagatgatgtctcaggccatgattaggggcatgatggatgaggaagggaaccagtttgtggcctatttcctgcctgtagaagagacgttgaagaaacgaaagcgggaccaggaggaggagatggactatgcaccagatgatgtgtatgactacaaaattgctcgggagtacaactggaacgtgaagaacaaagctagcaagggctatgaggaaaactaatacttcatcttc

SEQ ID NO: 5426 - DNA, 570 bp, Homo sapiens
ttttccggttgcggcgccgcgcggtgaggttgtctagtccacgctcggagccatgccgtccaagggcccgctgcagtctgtgcaggtcttcggacgcaagaagacagcgacagctgtggcgcactgcaaacgcggcaatggtctcatcaaggtgaacgggcggcccctggagatgattgagccgcgcacgctacagtacaagctgctggagccagttctgcttctcggcaaggagcgatttgctggtgtagacatccgtgtccgtgtaaagggtggtggtcacgtggcccagatttatgctatccgtcagtccatctccaaagccctggtggcctattaccagaaatatgtggatgaggcttccaagaaggagatcaaagacatcctcatccagtatgaccggaccctgctggtagctgaccctcgtcgctgcgagtccaaaaagtttggaggccctggtgcccgcgctcgctaccagaaatcctaccgataagcccatcgtgactcaaaactcacttgtataataaacagtttttgagggattttaaagtttcaaaaaaaaaaaaaaaa

SEQ ID NO: 5427 - protein, 146 aa, Homo sapiens [sequence omitted]

SEQ ID NO: 5428 - DNA, 3762 bp, Homo sapiens
agagaacagattcggaaactggggaggtctagcatgtggcgtaggagggggtcctcactccgcttcgcgattgccaaaacgagcctgccggaagcgccctaaggggttttcttctcccagggaaccagcggggaaactgaggctcggggtggagcgcaggattgtgggacgcgccaagactgctgtctttcccagcagcagcggaagatgtcggacagcgaggacagcaacttttccgaggaggaggacagcgagcgcagcagtgacggcgaggaggccgaggtagacgaagagcggcggagtgcagcgggcagtgagaaagaagaagagcctgaggacgaagaggaggaggaagaggaggaggaatatgatgaggaagaggaggaagaagatgatgaccgaccccccaagaaaccccgccatggaggcttcattctggacgaggctgatgttgacgatgagtatgaggacgaggaccagtgggaggatggagcagaggacattctagagaaagaagagattgaagcctccaatatcgataatgttgtcctggatgaagatcgttctggggctcgccgcctgcaaaacctctggagggaccagcgagaagaagaactgggcgagtattacatgaagaaatacgccaagtcatctgtgggagagacggtgtatggaggatctgatgagctctcagacgacatcacccagcagcagctgctcccaggagtcaaggatcccaatctgtggactgtcaaatgtaagattggggaggaacgggccacggccatttccttgatgcgcaagttcattgcctaccagttcacagacacgcccctgcagatcaagtcagtagtggcaccagagcatgtgaagggctacatctacgtggaggcctacaagcagacccacgtgaagcaggccattgagggggtgggcaacctgcggcttggctactggaaccagcagatggtgcccatcaaggagatgacagacgtgctcaaagtggtgaaggaggtggccaacctgaaaccaaagtcctgggtccgcctcaagcggggcatctacaaggatgacattgctcaggtggactacgtggagcccagccagaacaccatctccctgaagatgatcccacgcatcgactacgatcgcatcaaggcccgcatgagcttgaaagactggtttgccaaaaggaagaagtttaagcggcctccacagaggctgtttgatgctgagaagatcaggtccctggggggtgatgttgcctctgatggtgacttcctcatctttgaggggaaccgttacagccggaagggctttctgttcaagagcttcgccatgtctgctgtgatcacggagggtgtgaagccaacactctctgagctggaaaagtttgaggaccagccagagggcattgacctggaggtggtgactgagagcacagggaaggagcgggagcacaacttccaacctggggacaacgtggaggtctgtgagggtgagctcatcaacctgcagggcaagatcctcagcgtggatggcaacaagatcaccatcatgcccaagcatgaggacctcaaggacatgttggagttcccagcccaggaacttagaaaatacttcaagatgggggaccacgtgaaggtgattgctggccgattcgagggcgacacaggcctcattgtgcgggtggaggagaatttcgttatcctgttctctgacctcaccatgcatgagctgaaggtgctcccccgggacctgcagctctgctcagagacagcatcaggtgtggatgttgggggccagcatgaatggggcgagctggtgcagctggatccccagactgtgggtgtcatcgtgcgactagaacgggagaccttccaggtgctgaacatgtacgggaaggtggtgactgtcagacatcaggctgtgacccggaagaaggacaaccgctttgctgtggccttggactcagagcagaacaacatccatgtgaaagacatcgttaaggtcattgatggcccccactcaggccgagaaggggagattcgccatctcttccgaagcttcgccttcctacattgcaagaaactggtggagaacgggggcatgtttgtctgcaagacccgccacctggtgctggctgggggctcaaagccccgtgatgtgaccaacttcaccgtgggtggctttgcgcctatgagtccccggatcagcagccccatgcaccccagtgctggaggtcagcgtggcggctttggtagcccaggtggcggcagtggtggcatgagcaggggccggggccggagggacaacgaactcatcggccagaccgtgcgcatctcccaggggccctacaaaggctacatcggtgtggtgaaagatgccacagagtccacggcccgtgtggagctgcactccacctgccagaccatctctgtggaccgtcagcggctcaccacggtgggctcacggcgcccgggcggcatgacctcgacctatgggaggacgcccatgtatggctcccagacgcccatgtatggctctggctcccgaacacccatgtacggctcacagacacccctccaggatggtagccgcaccccacactacggctcacagacgcccctgcatgatggcagccgcactcctgcccagagtggggcctgggaccccaacaaccccaacacgccgtcacgggctgaggaagaatatgagtatgctttcgatgatgagcccaccccgtccccgcaggcctatgggggaacccccaatccccaaacacctggctacccagacccctcgtccccacaggtcaacccacaatacaacccgcagacgccagggacgccggccatgtacaacacagaccagttctctccctatgctgccccctccccacaaggttcctaccagcccagccccagcccccagagctaccaccaggtggcgccaagcccagcaggctaccagaatacccactccccagccagctaccaccctacaccgtcgcccatggcctatcaggctagccccagcccgagccccgttggctacagtcctatgacacctggagctccctcccctggtggctacaacccacacacgccaggctcaggcatcgagcagaactccagcgactgggtaaccactgacattcaggtgaaggtgcgggacacctacctggatacacaggtggtgggacagacaggtgtcatccgcagtgtcacggggggcatgtgctctgtgtacctgaaggacagtgagaaggttgtcagcatttccagtgagcacctggagcctatcacccccaccaagaacaacaaggtgaaagtgatcctgggcgaggatcgggaagccacgggcgtcctactgagcattgatggtgaggatggcattgtccgtatggaccttgatgagcagctcaagatcctcaacctccgcttcctggggaagctcctggaagcctgaagcaggcagggccggtggacttcgtcggatgaagagtgatcctccttccttccctggcccttggctgtgacacaagatcctcctgcagggctaggcggattgttctggatttccttttgtttttccttttagttttccatcttttccctccctggtgctcattggaatctgagtagagtctgggggagggtccccaccttcctgtacctcctccccacagcttgcttttgttgtaccgtctttcaataaaaagaagctgtttggtctaaaaaaaaaaaaaaaaaaaaaaaa

SEQ ID NO: 5429 - protein, 1087 aa, Homo sapiens
MSDSEDSNFSEEEDSERSSDGEEAEVDEERRSAAGSEKEEEPEDEEEEEEEEEYDEEEEEEDDDRPPKKPRHGGFILDEADVDDEYEDEDQWEDGAEDILEKEEIEASNIDNVVLDEDRSGARRLQNLWRDQREEELGEYYMKKYAKSSVGETVYGGSDELSDDITQQQLLPGVKDPNLWTVKCKIGEERATAISLMRKFIAYQFTDTPLQIKSVVAPEHVKGYIYVEAYKQTHVKQAIEGVGNLRLGYWNQQMVPIKEMTDVLKVVKEVANLKPKSWVRLKRGIYKDDIAQVDYVEPSQNTISLKMIPRIDYDRIKARMSLKDWFAKRKKFKRPPQRLFDAEKIRSLGGDVASDGDFLIFEGNRYSRKGFLFKSFAMSAVITEGVKPTLSELEKFEDQPEGIDLEVVTESTGKEREHNFQPGDNVEVCEGELINLQGKILSVDGNKITIMPKHEDLKDMLEFPAQELRKYFKMGDHVKVIAGRFEGDTGLIVRVEENFVILFSDLTMHELKVLPRDLQLCSETASGVDVGGQHEWGELVQLDPQTVGVIVRLERETFQVLNMYGKVVTVRHQAVTRKKDNRFAVALDSEQNNIHVKDIVKVIDGPHSGREGEIRHLFRSFAFLHCKKLVENGGMFVCKTRHLVLAGGSKPRDVTNFTVGGFAPMSPRISSPMHPSAGGQRGGFGSPGGGSGGMSRGRGRRDNELIGQTVRISQGPYKGYIGVVKDATESTARVELHSTCQTISVDRQRLTTVGSRRPGGMTSTYGRTPMYGSQTPMYGSGSRTPMYGSQTPLQDGSRTPHYGSQTPLHDGSRTPAQSGAWDPNNPNTPSRAEEEYEYAFDDEPTPSPQAYGGTPNPQTPGYPDPSSPQVNPQYNPQTPGTPAMYNTDQFSPYAAPSPQGSYQPSPSPQSYHQVAPSPAGYQNTHSPASYHPTPSPMAYQASPSPSPVGYSPMTPGAPSPGGYNPHTPGSGIEQNSSDWVTTDIQVKVRDTYLDTQVVGQTGVIRSVTGGMCSVYLKDSEKVVSISSEHLEPITPTKNNKVKVILGEDREATGVLLSIDGEDGIVRMDLDEQLKILNLRFLGKLLEA

SEQ ID NO: 5430 - DNA, 2171 bp, Homo sapiens
ctcagaggctggagggatcctccgtatgctgaacgctggtcccctgggccccctttatttctttctctatactttgtttctgtgtctttttctcttccaaagtctctcgttccacctaacgagaaacacccacaggtgtggaggggcaacccatcccttcagacaattgggaggtgagggccgattgccttacacggtgagacaagcggcctgactcgtgactatttttttggacaaatcaggcagccactgactcccttcattatggcctcagctttatctctgggcaataagtgtgatcccttccttcgctgcgtcctttgcaggggcggtggcgctctgcaaggcccaagggggcgtggtccagatgactttgaatcccagttgtcgcccccagggtcagccaggagactagtcagaagcaaacgcgcctgcggcaatccgcccgatgcctttggtctctctcgggcttccgtccacccgcccctcccccgcgtttccattggctgtagctccggcccggggcgggcgaagagggagcgagtgggcggggccgcgtggcgtcagcgcaagatggcggcctcggcagcggtgttctcgcgcttgcgaagcgggctccggctcggctcgcggggactgtgcacgaggttggcgacgccgccccgccgggccccagatcaggccgcagagatcgggagccgcgggagcactaaggcgcaagggccacagcagcagccgggctcagagggtcccagctatgccaaaaaagttgcgctctggcttgctgggctgcttggagctggtgggactgtgagcgtcgtctatatctttggaaacaacccggtggacgaaaatggtgccaagattcctgatgagttcgacaatgatccaattctggtacagcagttgcgccggacatacaaatatttcaaagattatagacagatgatcatcgagcccaccagcccttgccttctcccagaccctctgcaggaaccgtactaccagccaccctacacgctcgttttggagctcaccggcgtcctcttgcatcctgagtggtcgctggccactggctggaggtttaagaagcgcccaggcatcgagaccttgttccagcagcttgcccctttatatgaaattgtcatctttacgtcagagactggcatgactgcgtttccactcattgatagtgtggacccccatggcttcatctcctaccgcctattccgggacgccacaagatacatggatggacaccatgtaaaggatatttcatgtctgaatcgggacccagctcgagtagtagttgtggactgcaagaaggaagccttccgcctgcagccctataacggcgttgccctgcggccctgggacggcaactctgatgaccgggtcttgttggatctgtctgccttcctcaagaccattgcactgaatggtgtggaggacgtgcgaaccgtgctggagcactatgccctggaggatgacccgctggcggctttcaaacagcggcaaagccggctagagcaggaggagcagcagcgcctggccgagctctccaagtccaacaagcagaacctcttccttggctccctcaccagccgcttgtggcctcgctccaaacagccctgaactctgggcctcctcaaactcagtgcctgggtccagggccccagtgcttccagaccaagacttgggccaccacttgtccaataaagtacatcccagacgccacacctgctgtgtcccgagagtctccagatgggggcatcagggtgaggtccgggactcttgggtcatcgtcccacagtggctgatcggctgccaagcacagtgggggtgctttgttggatcagagcagatttttcaccctggtctcggaatctaaaaaccctcgctgtgtcttcctgtgtgttgcgtgatctgtgaaaaatacatctccctctgaccacagactcctcatctgtggagaagggaagagaggatggcacttggctttaaagacaggtagctgccaggctactgtggagagaatgtgttatgggcctagtgggcctctggtggaccagagattacccctctcaacaggccagctgctggttggctccagccagtgtggccctggggtaaagggggcctggagttgcttgacacgccagttgttcaaa

SEQ ID NO: 5431 - protein, 456 aa, Homo sapiens
MASALSLGNKCDPFLRCVLCRGGGALQGPRGRGPDDFESQLSPPGSARRLVRSKRACGNPPDAFGLSRASVHPPLPRVSIGCSSGPGRAKRERVGGAAWRQRKMAASAAVFSRLRSGLRLGSRGLCTRLATPPRRAPDQAAEIGSRGSTKAQGPQQQPGSEGPSYAKKVALWLAGLLGAGGTVSVVYIFGNNPVDENGAKIPDEFDNDPILVQQLRRTYKYFKDYRQMIIEPTSPCLLPDPLQEPYYQPPYTLVLELTGVLLHPEWSLATGWRFKKRPGIETLFQQLAPLYEIVIFTSETGMTAFPLIDSVDPHGFISYRLFRDATRYMDGHHVKDISCLNRDPARVVVVDCKKEAFRLQPYNGVALRPWDGNSDDRVLLDLSAFLKTIALNGVEDVRTVLEHYALEDDPLAAFKQRQSRLEQEEQQRLAELSKSNKQNLFLGSLTSRLWPRSKQP

SEQ ID NO: 5432 - DNA, 1971 bp, Homo sapiens
gaaggccatggtctccccacggatgtccgggctcctctcccagactgtgatcctagcgctcattttcctcccccagacacggcccgctggcgtcttcgagctgcagatccactctttcgggccgggtccaggccctggggccccgcggtccccctgcagcgcccggctcccctgccgcctcttcttcagagtctgcctgaagcctgggctctcagaggaggccgccgagtccccgtgcgccctgggcgcggcgctgagtgcgcgcggaccggtctacaccgagcagcccggagcgcccgcgcctgatctcccactgcccgacgggctcttgcaggtgcccttccgggacgcctggcctggcaccttctctttcatcatcgaaacctggagagaggagttaggagaccagattggagggcccgcctggagcctgctggcgcgcgtggctggcaggcggcgcttggcagccggaggcccgtgggcccgggacattcagcgcgcaggcgcctgggagctgcgcttctcgtaccgcgcgcgctgcgagccgcctgccgtcgggaccgcgtgcacgcgcctctgccgtccgcgcagcgccccctcgcggtgcggtccgggactgcgcccctgcgcaccgctcgaggacgaatgtgaggcgccgctggtgtgccgagcaggctgcagccctgagcatggcttctgtgaacagcccggtgaatgccgatgcctagagggctggactggacccctctgcacggtccctgtctccaccagcagctgcctcagccccaggggcccgtcctctgctaccaccggatgccttgtccctgggcctgggccctgtgacgggaacccgtgtgccaatggaggcagctgtagtgagacacccaggtcctttgaatgcacctgcccgcgtgggttctacgggctgcggtgtgaggtgagcggggtgacatgtgcagatggaccctgcttcaacggcggcttgtgtgtcgggggtgcagaccctgactctgcctacatctgccactgcccacctggtttccaaggctccaactgtgagaagagggtggaccggtgcagcctgcagccatgccgcaatggcggactctgcctggacctgggccacgccctgcgctgccgctgccgcgccggcttcgcgggtcctcgctgcgagcacgacctggacgactgcgcgggccgcgcctgcgctaacggcggcacgtgtgtggagggcggcggcgcgcaccgctgctcctgcgcgctgggcttcggcggccgcgactgccgcgagcgcgcggacccgtgcgccgcgcgcccctgtgctcacggcggccgctgctacgcccacttctccggcctcgtctgcgcttgcgctcccggctacatgggagcgcggtgtgagttcccagtgcaccccgacggcgcaagcgccttgcccgcggccccgccgggcctcaggcccggggaccctcagcgctaccttttgcctccggctctgggactgctcgtggccgcgggcgtggccggcgctgcgctcttgctggtccacgtgcgccgccgtggccactcccaggatgctgggtctcgcttgctggctgggaccccggagccgtcagtccacgcactcccggatgcactcaacaacctaaggacgcaggagggttccggggatggtccgagctcgtccgtagattggaatcgccctgaagatgtagaccctcaagggatttatgtcatatctgctccttccatctacgctcgggaggtagcgacgccccttttccccccgctacacactgggcgcgctgggcagaggcagcacctgctttttccctacccttcctcgattctgtccgtgaaatgaattgggtagagtctctggaaggttttaagcccattttcagttctaacttactttcatcctattttgcatccctcttatcgttttgagctacctgccatcttctcttt

SEQ ID NO: 5433 - protein, 618 aa, Homo sapiens
MVSPRMSGLLSQTVILALIFLPQTRPAGVFELQIHSFGPGPGPGAPRSPCSARLPCRLFFRVCLKPGLSEEAAESPCALGAALSARGPVYTEQPGAPAPDLPLPDGLLQVPFRDAWPGTFSFIIETWREELGDQIGGPAWSLLARVAGRRRLAAGGPWARDIQRAGAWELRFSYRARCEPPAVGTACTRLCRPRSAPSRCGPGLRPCAPLEDECEAPLVCRAGCSPEHGFCEQPGECRCLEGWTGPLCTVPVSTSSCLSPRGPSSATTGCLVPGPGPCDGNPCANGGSCSETPRSFECTCPRGFYGLRCEVSGVTCADGPCFNGGLCVGGADPDSAYICHCPPGFQGSNCEKRVDRCSLQPCRNGGLCLDLGHALRCRCRAGFAGPRCEHDLDDCAGRACANGGTCVEGGGAHRCSCALGFGGRDCRERADPCAARPCAHGGRCYAHFSGLVCACAPGYMGARCEFPVHPDGASALPAAPPGLRPGDPQRYLLPPALGLLVAAGVAGAALLLVHVRRRGHSQDAGSRLLAGTPEPSVHALPDALNNLRTQEGSGDGPSSSVDWNRPEDVDPQGIYVISAPSIYAREVATPLFPPLHTGRAGQRQHLLFPYPSSILSVK

SEQ ID NO: 5434 - DNA, 2540 bp, Homo sapiens
gggatgggggcggagtccagggcgtgggggggccggtttgttgtggtcgccattttgctggttgcattactgggtaatcggggccctggcttgccgcgtccgccggataccctcagccagtgggcaggtctgagctcgggctccccgagcagtttgagtccccttgcccgctccttcaggtctcagcggcggtggcagccgaggtgcaggatgcaagaaggcgccccccggccgggctcccgctccaggcctcgctcccctgcggccctctgagcccaccatggccgtcccaccgggccatggtcccttctctggcttcccagggccccaggagcacacgcaggtattgcctgatgtgcggctactgcctcggaggctgcccctggccttccgggatgcaacctcagccccgctgcgtaagctctctgtggacctcatcaagacctacaagcacatcaatgaggtatactatgcgaagaagaagcggcgggcccagcaggcgccaccccaggattcgagcaacaagaaggagaagaaggtcctgaaccatggttatgatgacgacaaccatgactacatcgtgcgcagtggcgagcgctggctggagcgctacgaaattgactcgctcattggcaaaggctcctttggccaggtggtgaaagcctatgatcatcagacccaggagcttgtggccatcaagatcatcaagaacaaaaaggctttcctgaaccaggcccagattgagctgcggctgctggagctgatgaaccagcatgacacggagatgaagtactatatagtacacctgaagcggcacttcatgttccggaaccacctgtgcctggtatttgagctgctgtcctacaacctgtacgacctcctgcgcaacacccacttccgcggcgtctcgctgaacctgacccggaagctggcgcagcagctctgcacggcactgctctttctggccacgcctgagctcagcatcattcactgcgacctcaagcccgaaaacatcttgctgtgcaaccccaagcgcagcgccatcaagattgtggacttcggcagctcctgccagcttggccagaggatctaccagtatatccagagccgcttctaccgctcacctgaggtgctcctgggcacaccctacgacctggccattgacatgtggtccctgggctgcatccttgtggagatgcacaccggagagcccctcttcagtggctccaatgaggtcgaccagatgaaccgcattgtggaggtgctgggcatcccaccggccgccatgctggaccaggcgcccaaggctcgcaagtactttgaacggctgcctgggggtggctggaccctacgaaggacgaaagaactcaggaaggattaccagggccccgggacacggcggctgcaggaggtgctgggcgtgcagacgggcgggcccgggggccggcgggcgggggagccgggccacagccccgccgactacctccgcttccaggacctggtgctgcgcatgctggagtatgagcccgccgcccgcatcagccccctgggggctctgcagcacggcttcttccgccgcacggccgacgaggccaccaacacgggcccggcaggcagcagtgcctccacctcgcccgcgcccctcgacacctgcccctcttccagcaccgccagctccatctccagttctggaggctccagtggctcctccagtgacaaccggacctaccgctacagcaaccgatattgtgggggccctgggccccctatcacagactgtgagatgaacagcccccaggtcccaccctcccagccgctgcggccctgggcagggggtgatgtgccccacaagacacatcaagcccctgcctctgcctcgtcactgcctgggaccggggcccagttacccccccagccccgataccttggtcgtcccccatcaccaacctcaccaccacccccggagctgatggatgtgagcctggtgggcggccctgctgactgctccccacctcacccagcgcctgccccccagcacccggctgcctcagccctccggactcggatgactggaggtcgtccacccctcccgcctcctgatgaccctgccactctggggcctcacctgggcctccgtggtgtaccccagagcacagcagccagctcgtgaccctgccccctccctggggcccctcctgaagccataccctcccccatctgggggccctgggctcccatcctcatctctctccttgactggaattgctgctacccagctggggtgggtgaggcctgcactgattggggcctggggcaggggggtcaaggagagggttttggccgctccctccccactaaggactggacccttgggcccctctccccctttttttctatttattgtaccaaagacagtggtggtccggtggagggaagaccccccctcaccccaggaccctaggagggggtgggggcaggtagggggagatggccttgctcctcctcgctgtacccccagtaaagagctttctcacaaaaaa

SEQ ID NO: 5435 - protein, 629 aa, Homo sapiens
MAVPPGHGPFSGFPGPQEHTQVLPDVRLLPRRLPLAFRDATSAPLRKLSVDLIKTYKHINEVYYAKKKRRAQQAPPQDSSNKKEKKVLNHGYDDDNHDYIVRSGERWLERYEIDSLIGKGSFGQVVKAYDHQTQELVAIKIIKNKKAFLNQAQIELRLLELMNQHDTEMKYYIVHLKRHFMFRNHLCLVFELLSYNLYDLLRNTHFRGVSLNLTRKLAQQLCTALLFLATPELSIIHCDLKPENILLCNPKRSAIKIVDFGSSCQLGQRIYQYIQSRFYRSPEVLLGTPYDLAIDMWSLGCILVEMHTGEPLFSGSNEVDQMNRIVEVLGIPPAAMLDQAPKARKYFERLPGGGWTLRRTKELRKDYQGPGTRRLQEVLGVQTGGPGGRRAGEPGHSPADYLRFQDLVLRMLEYEPAARISPLGALQHGFFRRTADEATNTGPAGSSASTSPAPLDTCPSSSTASSISSSGGSSGSSSDNRTYRYSNRYCGGPGPPITDCEMNSPQVPPSQPLRPWAGGDVPHKTHQAPASASSLPGTGAQLPPQPRYLGRPPSPTSPPPPELMDVSLVGGPADCSPPHPAPAPQHPAASALRTRMTGGRPPLPPPDDPATLGPHLGLRGVPQSTAASS

SEQ ID NO: 5436 - DNA, 1135 bp, Homo sapiens
ggatccggcaacgaaggtaccatggccggactccggagccgcacaaaccagggctcgccatgaagccaggattcagtccccgtgggggtggctttggcggccgagggggctttggtgaccgtggtggtcgtggaggccgagggggctttggcgggggccgaggtcgaggcggaggctttagaggtcgtggacgaggaggaggtggaggcggcggcggcggtggaggaggaggaagaggtggtggaggcttccattctggtggcaaccggggtcgtggtcggggaggaaaaagaggaaaccagtcggggaagaatgtgatggtggagccgcatcggcatgagggtgtcttcatttgtcgaggaaaggaagatgcactggtcaccaagaacctggtccctggggaatcagtttatggagagaagagagtctcgatttcggaaggagatgacaaaattgagtaccgagcctggaaccccttccgctccaagctagcagcagcaatcctgggtggtgtggaccagatccacatcaaaccgggggctaaggttctctacctcggggctgcctcgggcaccacggtctcccatgtctctgacatcgttggtccggatggtctagtctatgcagtcgagttctcccaccgctctggccgtgacctcattaacttggccaagaagaggaccaacatcattcctgtgatcgaggatgctcgacacccacacaaataccgcatgctcatcgcaatggtggatgtgatctttgctgatgtggcccagccagaccagacccggattgtggccctgaatgcccacaccttcctgcgtaatggaggacactttgtgatttccattaaggccaactgcattgactccacagcctcagccgaggccgtgtttgcctccgaagtgaaaaagatgcaacaggagaacatgaagccgcaggagcagttgacccttgagccatatgaaagagaccatgccgtggtcgtgggagtgtacaggccaccccccaaggtgaagaactgaagttcagcgctgtcaggattgcgagagatgtgtgttgatactgttgcacgtgtgtttttctattaaaagactcatccgtcaaaaaaaaaaaaaaaaaaaaaaaaaaaaaa

SEQ ID NO: 5437 - protein, 321 aa, Homo sapiens
MKPGFSPRGGGFGGRGGFGDRGGRGGRGGFGGGRGRGGGFRGRGRGGGGGGGGGGGGGRGGGGFHSGGNRGRGRGGKRGNQSGKNVMVEPHRHEGVFICRGKEDALVTKNLVPGESVYGEKRVSISEGDDKIEYRAWNPFRSKLAAAILGGVDQIHIKPGAKVLYLGAASGTTVSHVSDIVGPDGLVYAVEFSHRSGRDLINLAKKRTNIIPVIEDARHPHKYRMLIAMVDVIFADVAQPDQTRIVALNAHTFLRNGGHFVISIKANCIDSTASAEAVFASEVKKMQQENMKPQEQLTLEPYERDHAVVVGVYRPPPKVKN

SEQ ID NO: 5438 - DNA, 1801 bp, Homo sapiens
caacgggggcatccactacatcacccttgatggccgtgtctacgacctgcatggctcctgctcctatgtcttggcccaagtctgccacccaaagcctggggacgaggacttttccatcgtgcttgagaagaatgcagctggagatctccaacgcctcctggttactgtggctggccaggttgtgagcctagctcaggggcagcaggtcaccgtggacggcgaggctgtggccctgcctgtggctgtgggccgcgtgcgggtgaccgccgagggccgaaacatggttctgcagacgaccaaggggctgcggcttctctttgatggcgatgcccacctcctcatgtccatccccagccccttccgtggacggctctgtggcctctgtgggaacttcaatggcaactggagtgacgactttgtcctgcccaatggctcagcagcgtccagtgtggagaccttcggggctgcatggcgggcgcccggctcctccaagggctgtggcgagggctgcgggccccaaggctgcccagtgtgcttggcagaggagactgcaccctatgagagcaacgaggcctgcgggcagctccggaacccccagggccccttcgcgacctgccaggcggtgctgagtccctctgagtacttccgccaatgcgtatacgacctgtgcgcgcaaaagggtgacaaagccttcctgtgccgcagcctggcagcctacacggcggcctgtcaggcagctggcgtggccgtgaagccctggaggacagacagcttctgcccgctccattgccccgcccacagccactactccatctgcactcgcacctgccagggatcctgtgcggctctctccggcctcacgggctgcaccacccgctgttttgagggctgtgagtgcgacgaccgcttcctgctttcccagggtgtctgcatccctgtccaagattgtggctgcacccataatggccgatacttgccggtaaactcctccctgctgacctcagactgcagcgagcgctgttcctgttcctcaagctctggcctgacatgccaggcagctggctgcccaccaggccgtgtatgtgaggtcaaggctgaagcccggaactgctgggccacccgtggtctctgtgtcctgtctgtgggtgccaacctcaccacctttgatggggcccgtggtgccaccacctctcctggtgtctatgagctctcttcccgctgcccaggactacagaataccatcccctggtaccgtgtagttgccgaagtccagatctgccatggcaaaacggaggctgtgggccaggtccacatcttcttccaggatgggatggtgacgttgactccaaacaagggtgtgtgggtgaatggtctccgagtggatctcccagctgagaagttagcatctgtgtccgtgagtcgtacacctgatggctccctgctagtccgccagaaggcaggggtccaggtgtggcttggagccaatgggaaggtggctgtgattgtcagcaatgaccatgctgggaaactgtgtggggcctgtggaaactttgacggggaccagaccaatgattggcatgactcccaggagaagccagcgatggagaaatggagagcgcaggacttctccccatgttatggctgatcagtcatccaccaggaacgaagatttcctgaagaagacctggtccctctggaggttgcagtggctgaaggatgcatcatgtgctcctaccctgctctaccgcttttctgggtcacagaggccaaatgtgagagcattgaataaatatcttaagct

SEQ ID NO: 5439 - DNA, 1477 bp, Homo sapiens
gtcaacttagtgtacaatgctgtcagatgaaccttacccttgtaaggcttgtaacttggttcctccctttcttaagcccttattggctatctttcttcttttaatatttaaagtttttaatctttaaatttttaatttttaaaccatgcttgtttaacctgctggtaaaattcacgtctttcagactgtaatgctttcatgccaagtaaatggtcttgccaggcttccagcctgtttcagagaccactagcccagagccgtatcagccccttcagcaagccataagaaatttctactcctcctggaaatagatgtagagactatgtccatgcttagcaggaagtagttccagaagagacctttgctccttaagaataaggagaatgaggactgcgaaggagaacgcagcaagcccaggcggcggtggaaaggctggaggacacacctaaacatgtggaatcccaatgccgggcagccagggccaaatccatatccccccaatattgggtgccctggaggttccaatcctgcccacccaccacctattaatccaccctttcccccaggcccctgtcctcctcccccaggagctccccatggcaatccagctttccccccaggtgggccccctcatcctgtgccacagccagggtatccaggatgccaaccgttgggtccctaccctcctccatacccaccgcctgcccctggaatccctcctgtgaatcccttggctcctggcatggttggaccagcagtgatagtggacaagaagatgcagaagaaaatgaagaaagctcataaaaagatgcacaagcaccaaaagcaccacaagtaccacaagcatgacaagcattcctcctcttcctcctcctcttccagcagtgattctgactgaatacaggccctggacccttccctcaagtcccaccagttctgctctcccatcaagcttcagatgccacgttgtactgggggaatgtagcccttgtgctccccaccccctacctccacctgagcctcaccctgctgttgagccctgagtggctaggggaaataggaagaggattgccatggcctggccatcttgttgctgcttggagagatcatatagctaatgaattaggcaggggagctattttttgaagatgatgaactaaatgttgaagacaagtttgagatctgtaaaatgtgattttttacttccacttataatacttgtgattggggaggtttgtggaaattcaattatgatgaaaaacctctatcttttttgtaatgttggcatacttgggggatttagtggcaaatacattccccagcaggccttttgttggttgcactaactgcaaggttgctgggaagtagagtccatttggttgatgagctttgactgcggttttggaaccttacctctcctccttagcccaatatgctgtctcgggtcctattcaaataaagttatttctcctggtct

SEQ ID NO: 5440 - DNA, 654 bp, Homo sapiens
gcgaaggagaacgcagcaagcccaggcggcggtggaaaggctggaggacacacctaaacatgtggaatcccaatgccgggcagccagggccaaatccatatccccccaggtgggccccctcatcctgtgccacagccagggtatccaggatgccaaccgttgggtccctaccctcctccatacccaccgcctgcccctggaatccctcctgtgaatcccttggctcctggcatggttggaccagcagtgatagtggacaagaagatgcagaagaaaatgaagaaagctcataaaaagatgcacaagcaccaaaagcaccacaagtaccacaagcatgacaagcattcctcctcttcctcctcctcttccagcagtgattctgactgaatacaggccctggacccttccctcaagtcccaccagttctgctctcccatcaagcttcagatgccacgttgtactgggggaatgtagcccttgtgctccccaccccctacctccacctgagcctcaccctgctgttgagccctgagtggctaggggaaataggaagaggattgccatggcctggccatcttgttgctgcttggagagatcatatagctaatgaattaggcaggggagctattttttgaagatgatgaactaaatgtt

SEQ ID NO: 5441 - DNA, 1425 bp, Homo sapiens
ggcttggtcactatggaggagataggcatcttggtggagaaggctcaggatgagatcccagcactgtccgtgtcccggccccagaccggcctgtccttcctgggccctgagcctgaggacctggaggacctgtacagccgctacaagaagctgcagcaagagctggagttcctggaggtgcaggaggaatacatcaaagatgagcaaaagaacctgaaaaaggaatttctccatgcccaggaggaggtgaagcgaatccaaagcatcccgctggtcatcggacaatttctggaggctgtggatcagaatacagccatcgtgggctctaccacaggctccaactattatgtgcgcatcctgagcaccatcgatcgggagctgctcaagcccaacgcctcagtggccctccacaagcacagcaatgcactggtggacgtgctgccccccgaagccgacagcagcatcatgatgctcacctcagaccagaagccagatgtgatgtacgcggacatcggaggcatggacatccagaagcaggaggtgcgggaggccgtggagctcccgctcacgcatttcgagctctacaagcagatcggcatcgatcccccccgaggcgtcctcatgtatggcccacctggctgtgggaagaccatgttggcaaaggcggtggcacatcacacaacagctgcattcatccgggtcgtgggctcggagtttgtacagaagtatctgggtgagggcccccgcatggtccgggatgtgttccgcctggccaaggagaatgcacctgccatcatcttcatagacgagattgatgccatcgccaccaagagattcgatgctcagacaggggccgacagggaggttcagaggatcctgctggagctgctgaatcagatggatggatttgatcagaatgtcaatgtcaaggtaatcatggccacaaacagagcagacaccctggatccggccctgctacggccaggacggctggaccgtaaaattgaatttccacttcctgaccgccgccagaagagattgattttctccactatcactagcaagatgaacctctctgaggaggttgacttggaagactatgtggcccggccagataagatttcaggagctgatatcaactccatctgtcaggagagtggaatgttggctgtccgtgaaaaccgctacattgtcctggccaaggacttcgagaaagcatacaagactgtcatcaagaaggacgagcaggagcatgagttttacaagtgacccttcccttccctccaccacaccactcaggggctggggcttctctcgcacccccagcacctctgtcccaaaacctcattcccttttttctttacccaggattggtttcttcaataaatagataagatcgaatccaaaaaaaaaaaaaaaaaaaaa

SEQ ID NO: 5442 - protein, 418 aa, Homo sapiens
MEEIGILVEKAQDEIPALSVSRPQTGLSFLGPEPEDLEDLYSRYKKLQQELEFLEVQEEYIKDEQKNLKKEFLHAQEEVKRIQSIPLVIGQFLEAVDQNTAIVGSTTGSNYYVRILSTIDRELLKPNASVALHKHSNALVDVLPPEADSSIMMLTSDQKPDVMYADIGGMDIQKQEVREAVELPLTHFELYKQIGIDPPRGVLMYGPPGCGKTMLAKAVAHHTTAAFIRVVGSEFVQKYLGEGPRMVRDVFRLAKENAPAIIFIDEIDAIATKRFDAQTGADREVQRILLELLNQMDGFDQNVNVKVIMATNRADTLDPALLRPGRLDRKIEFPLPDRRQKRLIFSTITSKMNLSEEVDLEDYVARPDKISGADINSICQESGMLAVRENRYIVLAKDFEKAYKTVIKKDEQEHEFYK

SEQ ID NO: 5443 - DNA, 1593 bp, Homo sapiens
actgtgccctgtccacggtgcctcctgcatgtcctgctgccctgagctgtcccgagctaggtgacagcgtaccacgctgccaccatgaatgaggtgtctgtcatcaaagaaggctggctccacaagcgtggtgaatacatcaagacctggaggccacggtacttcctgctgaagagcgacggctccttcattgggtacaaggagaggcccgaggcccctgatcagactctaccccccttaaacaacttctccgtagcagaatgccagctgatgaagaccgagaggccgcgacccaacacctttgtcatacgctgcctgcagtggaccacagtcatcgagaggaccttccacgtggattctccagacgagagggaggagtggatgcgggccatccagatggtcgccaacagcctcaagcagcgggccccaggcgaggaccccatggactacaagtgtggctcccccagtgactcctccacgactgaggagatggaagtggcggtcagcaaggcacgggctaaagtgaccatgaatgacttcgactatctcaaactccttggcaagggaacctttggcaaagtcatcctggtgcgggagaaggccactggccgctactacgccatgaagatcctgcggaaggaagtcatcattgccaaggatgaagtcgctcacacagtcaccgagagccgggtcctccagaacaccaggcacccgttcctcactgcgctgaagtatgccttccagacccacgaccgcctgtgctttgtgatggagtatgccaacgggggtgagctgttcttccacctgtcccgggagcgtgtcttcacagaggagcgggcccggttttatggtgcagagattgtctcggctcttgagtacttgcactcgcgggacgtggtataccgcgacatcaagctggaaaacctcatgctggacaaagatggccacatcaagatcactgactttggcctctgcaaagagggcatcagtgacggggccaccatgaaaaccttctgtgggaccccggagtacctggcgcctgaggtgctggaggacaatgactatggccgggccgtggactggtgggggctgggtgtggtcatgtacgagatgatgtgcggccgcctgcccttctacaaccaggaccacgagcgcctcttcgagctcatcctcatggaagagatccgcttcccgcgcacgctcagccccgaggccaagtccctgcttgctgggctgcttaagaaggaccccaagcagaggcttggtggggggcccagcgatgccaaggaggtcatggagcacaggttcttcctcagcatcaactggcaggacgtggtccagaagaagctcctgccacccttcaaacctcaggtcacgtccgaggtcgacacaaggtacttcgatgatgaatttaccgcccagtccatcacaatcacaccccctgaccgctatgacagcctgggcttactggagctggaccagcggacccacttcccccagttctcctactcggccagcatccgcgagtgagcagtctgcccacgcagaggacgcacgctcgctgccatcaccgctgggtggttttttccccct

SEQ ID NO: 5444 - DNA, 2114 bp, Homo sapiens
ctctttataatttagtttccatagaagttatatgtgcatttaaaaaaattcaatgctggagcgaccgtgtctggggagccgagccccgcttctcgctgcggtgagcccggactggggcacgcactgcgcagactccccgctgcagtgggcggagctcccacaggccccgccccctcctcccaccctcgttcagcctgtccagacagaagctggggcccagcggaggtagcagcagacgcctgagagcgaggccgaggcccctcagggtttggagaccctgacacacccaccttctcacctgggctctgcgtatcccccagccttgagggaagatgaagcctaaactgatgtaccaggagctgaaggtgcctgcagaggagcccgccaatgagctgcccatgaatgagattgaggcgtggaaggctgcggaaaagaaagcccgctgggtcctgctggtcctcattctggcggttgtgggcttcggagccctgatgactcagctgtttctatgggaatacggcgacttgcatctctttgggcccaaccagcgcccagccccctgctatgacccttgcgaagcagtgctggtggaaagcattcctgagggcctggacttccccaatgcctccacggggaacccttccaccagccaggcctggctgggcctgctcgccggtgcgcacagcagcctggacatcgcctccttctactggaccctcaccaacaatgacacccacacgcaggagccctctgcccagcagggtgaggaggtcctccggcagctgcagaccctggcaccaaagggcgtgaacgtccgcatcgctgtgagcaagcccagcgggccccagccacaggcggacctgcaggctctgctgcagagcggtgcccaggtccgcatggtggacatgcagaagctgacccatggcgtcctgcataccaagttctgggtggtggaccagacccacttctacctgggcagtgccaacatggactggcgttcactgacccaggtcaaggagctgggcgtggtcatgtacaactgcagctgcctggctcgagacctgaccaagatctttgaggcctactggttcctgggccaggcaggcagctccatcccatcaacttggccccggttctatgacacccgctacaaccaagagacaccaatggagatctgcctcaatggaacccctgctctggcctacctggcgagtgcgcccccacccctgtgtccaagtggccgcactccagacctgaaggctctactcaacgtggtggacaatgcccggagtttcatctacgtcgctgtcatgaactacctgcccactctggagttctcccaccctcacaggttctggcctgccattgacgatgggctgcggcgggccacctacgagcgtggcgtcaaggtgcgcctgctcatcagctgctggggacactcggagccatccatgcgggccttcctgctctctctggctgccctgcgtgacaaccatacccactctgacatccaggtgaaactctttgtggtccccgcggatgaggcccaggctcgaatcccatatgcccgtgtcaaccacaacaagtacatggtgactgaacgcgccacctacatcggaacctccaactggtctggcaactacttcacggagacggcgggcacctcgctgctggtgacgcagaatgggaggggcggcctgcggagccagctggaggccattttcctgagggactgggactccccttacagccatgaccttgacacctcagctgacagcgtgggcaacgcctgccgcctgctctgaggcccgatccagtgggcaggccaaggcctgctgggcccccgcggacccaggtgctctgggtcacggtccctgtccccgcgcccccgcttctgtctgccccattgtggctcctcaggctctctcccctgctctcccacctctacctccacccccaccggcctgacgctgtggccccgggacccagcagagctgggggagggatcagcccccaaagaaatgggggtgcatgctgggcctggccccctggcccacccccactttccagggcaaaaagggcccagggttataataagtaaataacttgtctgt

SEQ ID NO: 5445 - DNA, 2364 bp, Homo sapiens
gcacacccggaagtgggtgcgggccagccggctcgcccgggggccatggcagcagcggctactgcagccgagggggtccccagtcgggggcctcccggggaagtcattcatctgaatgtgggaggcaagagattcagtacctctcgccagactctcacctggatcccagactccttcttctccagtcttctgagcggacgcatctcgacgctgaaagatgagaccggagcaatcttcatcgatcagggaccattacagtcttcgcccacccgtcactctacgtcttgcgcatcacaaagagttggatcccaggggtgtccacggttccagcctcctccatgaagcccagttctatgggctcactcctctggttcgtcgcctgcagcttcgagaggagttggatcgatcttcttgtggaaacgtcctcttcaatggttacctgccgccaccagtgttcccagtgaagcggcggaaccggcacagcctagtggggcctcagcagctaggaggacggccagcccctgtccgacggagcaacacgatgccccccaaccttggcaatgcagggctgctgggccgaatgctggatgagaaaacccctccctcaccctcaggacaacctgaggagccggggatggtgcgcctggtgtgtggacaccataattggatcgctgtggcctatacccagtttctagtctgctacaggttgaaggaagcctctggctggcagctggtgttttccagcccccgcctggactggcccatcgaacgactggcgctcacagcccgggtgcatggtggggctttgggtgaacatgacaagatggtggcagcagccaccggcagcgagatcctgctatgggctctgcaggcggaaggcggtggctccgagataggggtctttcatctgggggtgcctgtggaggccttgttcttcgtcgggaaccagctcattgctacaagccacacagggcgcatcggggtgtggaatgccgtcaccaagcactggcaggtccaggaggtgcagcccatcaccagttatgacgcggcaggctccttcctcctcctgggctgcaacaacggctccatttactacgtggatgtgcagaagttccccttgcgcatgaaagacaacgacctccttgtcagcgagctctatcgggacccagcggaggatggggtcaccgccctcagtgtctacctcacccccaagaccagtgacagtgggaactggatcgagatcgcctatggcaccagctcagggggcgtgcgggtcatcgtgcagcacccggagactgtgggctcggggcctcagctcttccagaccttcactgtgcaccgcagccctgtcaccaagatcatgctgtcggagaagcacctcatctcagtctgtgccgacaacaaccacgtgcggacatggtctgtgactcgcttccgcggcatgatttccacccagcccggctccaccccactcgcttcctttaagatcctggctctggagtcggcagatgggcatggcggctgcagtgctggcaatgacattggcccctacggtgagcgggacgaccagcaagtgttcatccagaaggtggtgcccagtgccagccagctcttcgtgcgtctctcatctactgggcagcgggtgtgctccgtgcgctccgtggacggctcacccacgacagccttcacagtgctggagtgcgagggctcccggcggctcggctctcggccccggcgctacctgctcactggccaggccaacggcagcttggccatgtgggacctaaccaccgccatggacggcctcggccaggcccctgcaggtggcctgacggagcaagagctgatggaacagctggaacactgtgagctggccccgccggctccttcagctccctcatggggctgtctccccagcccctcaccccgcatctccctcaccagcctccactcagcctccagcaacacctccttgtctggccaccgtgggagcccaagccccccgcaggctgaggcccggcgccgtggtgggggcagctttgtggaacgctgccaggaactggtgcggagtgggccagacctccgacggccacccacaccagccccgtggccctccagcggtctcggcactcccctcacacctcccaagatgaagctcaatgaaacttccttttgaacaacgcagctgccatgatgccttgggatgccctggtcctgggggactcaggtgcctccctgattcctgtgggaaccccgggttcagggccagggcctccttggaataaatggttattgttactaggtccccaccttccctcttttctggaagccaaagtcaccctccccaataaagtcctcactgcc

SEQ ID NO: 5446 - DNA, 4889 bp, Homo sapiens
cgttgctgtttgtcgctgctgcccgggccagacgtctaggaggagccgctgcatccgagtccctggctgtctccgaagccttctgcagggtccgaagctgccagcccaaaaagtgtgcaggcccccagcggtgcctgaacccagtgcctgcagtgcccagtcccagccccagcgtgaggaagagacaggtgtccctcaactggcagccactgacgctccaggaggccagagctctactgaagcggcggcggccccgggggccagggggccggggactactgagaaggaggcccccacagcgtgcccccgctggcaaggccccggtcctgtgtcccttgatctgtcacaatggcggtgtgtgcgtgaagcctgaccgctgcctctgtcccccggacttcgctggcaagttctgccagttgcactcctcgggcgcccggcccccggccccggctgtaccaggcctcacccgctccgtgtacactatgccactggccaaccaccgcgacgacgagcacggcgtggcatctatggtgagcgtccacgtggagcacccgcaggaggcgtcggtggtggtgcaccaggtggagcgtgtgtctggcccttgggaggaggcggacgctgaggcggtggcgcgggcggaagcggcggcgcgggcggaggcggcagcgccctacacggtgttggcacagagcgcgccgcgggaggacggctactcagatgcctcgggcttcggttactgctttcgggagctgcgcggaggcgaatgcgcgtccccgctgcccgggctccggacgcaggaggtctgctgccgaggggccggcttggcctggggcgttcacgactgtcagctgtgctccgagcgcctggggaactccgaaagagtgagcgccccagatggaccttgtccaaccggctttgaaagagttaatgggtcctgcgaagatgtggatgagtgcgcgactggcgggcgctgccagcacggcgagtgtgcaaacacgcgcggcgggtacacgtgtgtgtgccccgacggctttctgctcgactcgtcccgcagcagctgcatctcccaacacgtgatctcagaggccaaagggccctgcttccgcgtgctccgcgacggcggctgttcgctgcccattctgcggaacatcactaaacagatctgctgctgcagccgcgtaggcaaggcctggggccggggctgccagctctgcccacccttcggctcagagggtttccgggagatctgcccggctggtcctggttaccactactcggcctccgacctccgctacaacaccagacccctgggccaggagccaccccgagtgtcactcagccagcctcgtaccctgccagccacctctcggccatctgcaggctttctgcccacccatcgcctggagccccggcctgaaccccggcccgatccccggcccggccctgagcttcccttgcccagcatccctgcctggactggtcctgagattcctgaatcaggtccctcctccggcatgtgtcagcgcaacccccaggtctgcggcccaggacgctgcatttcccggcccagcggctacacctgcgcttgcgactctggcttccggctcagcccccagggcacccgatgcattgatgtggacgaatgtcgccgcgtgcccccgccctgtgctcccgggcgctgcgagaactcaccaggcagcttccgctgcgtgtgcggcccgggcttccgagccggcccacgggctgcggaatgcctggatgtggacgagtgccaccgcgtgccgccgccgtgtgacctcgggcgctgcgagaacacgccaggcagcttcctgtgcgtgtgccccgccgggtaccaggctgcaccgcacggagccagctgccaggatgtggatgaatgcacccagagcccaggcctgtgtggccgaggggcctgcaagaacctgcctggctctttccgctgtgtttgcccggctggcttccggggctcggcgtgtgaagaggatgtggatgagtgtgcccaggagccgccgccctgtgggcccggccgctgtgacaacacggcaggctcctttcactgtgcctgccctgctggcttccgctcccgagggcccggggccccctgccaagatgtggatgagtgtgcccgaagccccccaccctgcacctacggccggtgtgagaacacagaaggcagcttccagtgtgtctgccccatgggcttccaacccaacactgctggctccgagtgcgaggatgtggatgagtgtgagaaccacctcgcatgccctgggcaggagtgtgtgaactcgcccggctccttccagtgcaggacctgtccttctggccaccacctgcaccgtggcagatgcactgatgtggacgaatgcagttcgggtgcccctccctgtggtccccacggccactgcactaacaccgaaggctccttccgctgcagctgcgcgccaggctaccgggcgccgtcgggtcggcccgggccctgcgcagacgtgaacgagtgcctggagggcgatttctgcttccctcacggcgagtgcctcaacactgacggctcctttgcctgtacttgtgcccctggctaccgacccggaccccgcggagcctcttgcctcgacgttgacgagtgcagcgaggaggacctttgccagagcggcatctgtaccaacaccgacggctccttcgagtgcatctgtcctccgggacaccgcgctggcccggacctcgcctcctgcctcgacgtggacgaatgtcgcgagcgaggcccagccctgtgcgggtcgcagcgctgtgagaactctcccggctcctaccgctgtgtccgggactgcgatcctgggtaccacgcgggccccgagggcacctgtgacgatgtggatgagtgccaagaatatggtcccgagatttgtggagcccagcgttgtgagaacacccctggctcctaccgctgcacaccagcctgtgaccctggctatcagcccacgccagggggcggatgccaggatgtgaacgagtgtgaaacactacagggtgtatgtggagctgccctgtgtgaaaatgtcgaaggctccttcctctgtgtctgccccaacagcccggaagagtttgaccccatgactggacgctgtgttcccccacgaacttctgctggcacgttcccaggctcgcagccccaggcacctgctagccccgttctgcccgccaggccacctccgccacccctgccccgccgacccagcacacctaggcagggccctgtggggagtgggcgccgggagtgctactttgacacagcggccccggatgcatgtgacaacatcctggctcggaatgtgacatggcaggagtgctgctgtactgtgggtgagggctggggcagcggctgccgcatccagcagtgcccgggcaccgagacagctgagtaccagtcattgtgccctcacggccggggctacctggcgcccagtggagacctgagcctccggagagacgtggacgaatgtcagctcttccgagaccaggtgtgcaagagtggcgtgtgtgtgaacacggccccgggctactcatgctattgcagcaacggctactactaccacacacagcggctggagtgcatcgacaatgacgagtgcgccgatgaggaaccggcctgtgagggcggccgctgtgtcaacactgtgggctcttatcactgtacctgcgagcccccactggtgctggatggctcgcagcgccgctgcgtctccaacgagagccagagcctcgatgacaatctgggagtgtgctggcaggaagtgggggctgacctcgtgtgcagccaccctcggctggaccgtcaggccacctacacagagtgctgctgcctgtatggagaggcctggggcatggactgcgccctctgccctgcgcaggactcagatgacttcgaggccctgtgcaatgtgctacgcccccccgcatatagccccccgcgaccaggtggctttggactcccctacgagtacggcccagacttaggtccaccttaccagggcctcccatatgggcctgagttgtacccaccacctgcgctaccctacgacccctacccaccgccacctgggcccttcgcccgccgggaggctccttatggggcaccccgcttcgacatgccagactttgaggacgatggtggcccctatggcgaatctgaggctcctgcgccacctggcccgggcacccgctggccctatcggtcccgggacacccgccgctccttcccagagcccgaggagcctcctgaaggtggaagctatgctggttccctggctgagccctacgaggagctggaggcggaggagtgcgggatcctggacggctgcaccaacggccgctgcgtgcgcgtccccgaaggcttcacctgccgttgcttcgacggctaccgcctggacatgacccgcatggcctgcgttgacatcaacgagtgtgatgaggccgaggctgcctccccgctgtgcgtcaacgcgcgttgcctcaacacggatggctccttccgctgcatctgccgcccgggattcgcacccacgcaccagccgcaccactgtgcgcccgcacggccccgggcctgagccctggcacccgctggccgcccacccgcgcccgccactcggggcccctgccgcgcatcctgcagcccgcttatgcgtatgtgcacggggccgcccgcctggacctggagaagggacctacggacgcctggaagctgcgacgccctgcactgctcccgcctccaccagcgcctcccactgatgtcgtggtcccgggcctggcccaggggcccctttacatgccctctcccttttataaaattttccattaaaaaccacctattttct

SEQ ID NO: 5447 - DNA, 2347 bp, Homo sapiens
gtggttatcgcggcgcccaccggcctctgatctctgagtcttctccaacccacagacgttttttgttgctctggttccaggaccttctccacaactaggccattttccctgccaggtgtcctttttgacctcttgacctctgactcaaaggtcagctcaaaggttccgaactcgggcctgggatgtgagggggtactgaacctaagttctccgaatctttagccctgggtccctaagtcgcatccttaaggcacctcactctagatctgagccttcatatcccaaactcactcatgagtttccacatccagccccaaagaatgagttaactcctactaactctccacctaagactcccgaggtaacccaaccggtaccacagatccggttccggatttaaggaccccaccctgttaaccgtcaggtgccttatgacttgagtcagcctcgcaattcctgctcccgtggtttcaaatattagccctggtcctttcacacccactgctcagtccccagattctggaactcagctcttaaacctttaaaatctccatccctgagaccgttctccgttggaggatccttccctccccgctttctgaacctctcaacacctcctgtagaccccaaaatgacttctccatgctctcctcccctaaaaccaccaatttctcctccaaaaacccctgtaccccaagccagcagcattccatctcctcctctacccccaagtcccctggacttttcagctttaccatcccctccctggagtcagcagacccctgttcccccaccgctcccactgcctcctccacccgctgccacagggcctgctccccgtcatgtcttcggcctggagaagagccagctcctgaaggaggcctttgataaggccggcccggtccccaagggcagagaagatgtgaagaggcttctgaaactacacaaggaccggttccgaggtgacctgcggtggatcctcttctgtgcagacctgccgtccctcatccaagaaggccctcaatgcgggctggtggccttgtggatggcaggtactctcctgtcgccccccagtggcgtccccctggagagactcatacgggtggccacggaaagaggctacacggcccagggagagatgttctcagcaccagctacgacgaggacttcaaccatgagccgtgtcagaggaagggccacaaggcacactgggcggtgagtgcaggggtcctgctgggtgttcgggctgtgcccagtctcggctacactgaggaccctgagctgccgggcctgttccacccagtgctgggcacgccctgccaaccaccatccctgccagaggagggctccccgggagctgtctacctgctgtccaagcagggcaagagttggcactatcagctgtgggactacgaccaggtccgggagagcaacctgcagctgacggacttctcgccctcacgggccactgacggccgggtgtacgtggtgcccgtgggtggggtacgggctggcctctgtggccaggccctgctcctcacaccacaggactgcagccattagctgcggctgcggtctcaggctgcagcctagctcgttttaaagcccatctgggagcagttacctgtgccagcccctctacctgtgttagcagatctggcaaccctgtaaggggggtgctagatggacccgatttgacagatggcaagactgaggcctggagaagtggaatcactggcctgaggtcacatgactagcacatggcaagatggagtctcgttctgtcgtccaggctggagtgcggtggcgtgatctcagctcactccagcctccacttcccaggttcaagtgattctcctgcctcagccccccaagtaactgggattacaggcatgcaccaccatgcctggctaattttttgtatttttagtagagacggggctttgccatgttggccaggctggtctcgaactcctgaccttgagtaatccacccgcctcggcctcccaaagtgctgggattacaggtgtgagccactgagcccggccacagtgcagtatttctaaccagtgatcagggtaaagaggatgcgtgtccaccatcccagccctgatcagcctgtctgtgcatcccccatcccagccagggcttggagcagccttgctcaccactgtgtcccctgcattgtaacacatccaggcacaagaatagccgcccagtgactgccaagtgagtgaaccagcctgcttggagcctgcctctttcccaaactgctcattatcctgttaccccacccagcccacgtgtccaaatacactccagatgcaaaataaaaagctctacgaca

SEQ ID NO: 5448 - DNA, 1209 bp, Homo sapiens
gaattcctgacttccttttcggaggaagatccttgagcagccgacgttgggacaaaggatttggagaaacccagggctaaagtcacgtttttcctcctttaagacttacctcaacacttcactccatggcagttcccgagacccgccctaaccacactatttatatcaacaacctcaatgagaagatcaagaaggatgagctaaaaaagtccctgtacgccatcttctcccagtttggccagatcctggatatcctggtatcacggagcctgaagatgaggggccaggcctttgtcatcttcaaggaggtcagcagcgccaccaacgccctgcgctccatgcagggtttccctttctatgacaaacctatgcgtatccagtatgccaagaccgactcagatatcattgccaagatgaaaggcaccttcgtggagcgggaccgcaagcgggagaagaggaagcccaagagccaggagaccccggccaccaagaaggctgtgcaaggcgggggagccacccccgtggtgggggctgtccaggggcctgtcccgggcatgccgccgatgactcaggcgccccgcattatgcaccacatgccgggccagccgccctacatgccgccccctggtatgatccccccgccaggccttgcacctggccagatcccaccaggggccatgcccccgcagcagcttatgccaggacagatgccccctgcccagcctctttctgagaatccaccgaatcacatcttgttcctcaccaacctgccagaggagaccaacgagctcatgctgtccatgcttttcaatcagttccctggcttcaaggaggtccgtctggtacccgggcggcatgacatcgccttcgtggagtttgacaatgaggtacaggcaggggcagctcgcgatgccctgcagggctttaagatcacgcagaacaacgccatgaagatctcctttgccaagaagtagcaccttttccccccatgcctgccccttcccctgttctggggccacccctttcccccttggctcagccccctgaaggtaagtccccccttgggggccttcttggagccgtgtgtgagtgagtggtcgccacacagcattgtacccagagtctgtccccagacattgcacctggcgctgttaggccggaattaaagtggctttttgaggtttggtttttcacaaaaaaaaggaattc

SEQ ID NO: 5449 - protein, 282 aa, Homo sapiens
MAVPETRPNHTIYINNLNEKIKKDELKKSLYAIFSQFGQILDILVSRSLKMRGQAFVIFKEVSSATNALRSMQGFPFYDKPMRIQYAKTDSDIIAKMKGTFVERDRKREKRKPKSQETPATKKAVQGGGATPVVGAVQGPVPGMPPMTQAPRIMHHMPGQPPYMPPPGMIPPPGLAPGQIPPGAMPPQQLMPGQMPPAQPLSENPPNHILFLTNLPEETNELMLSMLFNQFPGFKEVRLVPGRHDIAFVEFDNEVQAGAARDALQGFKITQNNAMKISFAKK

SEQ ID NO: 5450 - DNA, 3420 bp, Homo sapiens
cggacgaggcacgagtgaggggggaggcggtggcggcggccattttgagccgctgccgccattggagtgggccccccccctttcccccttcgcctcctgacaggaaaggtttaagggggacagagccctgggaggccgggccgggctcgggggccaccccgggggcccgggccatggatgtgcgccgtctgaaggtgaacgaacttcgcgaggagctgcagcgccgcggcctggacactcgaggcctcaaggccgagcttgctgagcggctgcaggcggcgttggaggccgaggagcctgacgacgagcgggagctcgacgccgacgacgaaccggggcgacccgggcacatcaacgaggaggtcgagaccgaggggggctccgagctggaggggaccgcgcagccaccgccgcccgggctgcagccgcacgcggagcccggcggctactcggggccggacggacattatgccatggacaatattaccaggcagaaccaattctacgatacccaagtcatcaaacaagaaaacgagtcaggctacgagaggagaccactggaaatggagcagcagcaggcctatcgtccagaaatgaagacagagatgaagcaaggagcacccaccagcttcctcccgcctgaagcttctcaactcaagccagacaggcagcaattccagagtcgaaagaggccttatgaagaaaaccggggacgggggtactttgagcaccgagaggataggaggggccgctctcctcagcctcctgctgaagaggatgaagatgactttgatgatacccttgttgctattgacacctataactgcgacctccacttcaaggtggcccgagatcggagtagtggctatccgctcacaattgagggctttgcatacctgtggtcaggagcccgtgccagctatggggtcagaaggggccgtgtatgcttcgagatgaagatcaatgaggaaatctccgtgaagcaccttccgtctacagagcctgacccccacgtggtccgtatcggctggtccctggactcctgcagcacccagctaggcgaagagcctttctcctatggctatggaggcactgggaagaagtccaccaatagccggtttgaaaactacggagacaagtttgcagagaacgatgtgattggctgctttgcggattttgaatgtggaaatgacgtggaactgtcttttaccaagaatggaaagtggatgggcattgctttccgaatccagaaggaagccttggggggtcaggccctctatcctcatgtcctggtgaagaattgcgcagtggagttcaacttcggacagagagcagagccctactgttctgtcctcccggggtttaccttcatccagcaccttccccttagtgagcgtatccggggcaccgttggaccaaagagcaaggcagaatgtgagattctgatgatggtgggcctgcctgctgctggcaagaccacatgggccatcaaacatgcagcctccaacccttccaagaagtacaacatcctgggtaccaatgccatcatggataagatgcgggtgatgggcctacgccggcagcggaactatgctggccgctgggatgtcctgatccagcaggccacccagtgcctcaaccgcctcatccagattgctgcccgcaagaaacgcaactatatcctagatcagacaaatgtttatgggtcagcccagagacgaaaaatgagaccatttgaaggcttccagcgcaaagctattgtaatttgtcccactgacgaggacctaaaagaccgaacaataaagcgaaccgacgaggaagggaaggatgtcccagatcatgcggtcttagaaatgaaagccaacttcacgttgccagatgttggggacttcctggatgaggttctgttcattgagctgcagcgggaggaagcggacaagctagtgaggcagtacaacgaggaaggccgcaaggctgggccaccccctgaaaagcgctttgacaaccgaggtggtggtggcttccggggccgcgggggtggtggtggcttccagcgctatgaaaaccgaggaccccctggaggcaaccgtggcggcttccagaaccgagggggaggcagcggtggaggaggcaactaccgaggaggtttcaaccgcagcggaggtggtggctatagccagaaccgctggggtaacaacaaccgggataacaacaactccaacaacagaggcagctacaaccgggctccccagcaacagccgccaccacagcagcctccgccaccacagccaccaccccagcagccaccgccaccacccagctacagccctgctcggaaccccccaggggccagcacctacaataagaacagcaacatccctggctcaagcgccaataccagcacccccaccgtcagcagctacagccctccacagccgagttacagccagccaccctacaaccagggaggttacagccagggctacacagccccaccgcctccacctccaccaccacctgcctacaactatgggagctacggcggttacaacccggccccctataccccaccgccaccccccactgcacagacctaccctcagcccagctataaccagtatcagcagtatgcccagcagtggaaccagtactatcagaaccagggccagtggccgccatactacgggaactacgactacgggagctactccgggaacacacagggtggcacaagtacacagtagccagtgtgacccagaggctcccggaggcccctgccggcttcctccaccagcgcctgcctcggcccctcctctgcccccgccagatcccgtggtgctggggatggggtcatcccagggctgcctccctccagcccactgcctcccctctgaggggcttccttcccctccatagggccaggcatttttttctggattcaaacaggcaacaatgaccttttattttctgtttgtccccacctccccagccttccacctcctgttcttcctaccttcttcctttttgactaaataatccccacctcccttgatcatacagtgaggctacagtgactgaggggagaatcccctcctgttcactctcccaaccctgctccagcccctcagcttcccagaccctcatgcagttggttgtaaattctcccaggagctgttttactgtctacttttcaggattaaaaaaaaaatcaaaacttaaaaaaaaaaaagtttaaaaagcaaaatggggagggggaggaagcagtgacttttttttggtaattatgcgcttttttttaatttttagaatttgtctttttactgtgggtgggctgttgatatttcatcaagataagcatttctttcctgagttcaggtgactgaggaagagccacaaaacaaaacacaacaaaaccaaacc

SEQ ID NO: 5451 - DNA, 3344 bp, Homo sapiens
gcctgggcgcagcggtgcacccggacccggaacattctcaggcgaaagtgtctcttgcgtgcgtgggccggaggttagtgtgcggggcccgccgggcggttgaaaagtccgagagaatcaggatggaggccgtggcgacggcgacggcggcgaaggaacccgataagggctgcatagagcctggacctgggcactggggtgagctgagccggacaccagtcccatctaaaccccaggacaaagtggaagcagctgaggcaacaccagtggccctggacagtgacacctccggggctgaaaatgcagcagtgagtgctatgctgcacgctgtagccgccagccgcctgcctgtttgcagccagcagcagggtgaacccgacttgacagagcatgagaaagtggccatcctggcccagctgtaccacgagaagccactggtgttcctggagcgcttccgcacaggcctccgtgaggagcatctggcctgctttggccacgtgcgtggcgaccaccgtgcagacttctactgtgctgaggtggcccggcagggcactgcccggccccgcaccctgcgtacccgcctgcgtaaccggcgctatgctgccctgcgagagctgatccaagggggcgagtacttcagtgatgagcagatgcggttccgggcccccctgctatatgagcagtacatcgggcagtatctcacccaggaggagctcagtgcccgcaccccaacccaccagccccccaagcccgggtcccccgggagacctgcttgcccgctctccaacttgctgctccagtcctacgaggagcgggagctacagcagcgtctgctccaacagcaggaggaggaggaggcctgcttggaggaagaggaagaggaggaggacagtgacgaggaagaccagaggtcaggcaaggactcggaggcctgggttcccgactcggaggagaggctgatcctgcgagaggagttcaccagccgcatgcaccagcgcttcctagatggcaaggacggggactttgactacagcacagtagacgacaaccccgacttcgacaacctcgacatcgtggcacgggatgaggaggagaggtactttgatgaggaagaacctgaggatgcgcccagcccagagctggatggggactgatggccgccacccttcccaccgcctgccccatccccatccccaacaaggcagctgattccaggcctgctcagtgaccctttctctagggggacatcagggcagtgccccacaacccacacacaccaccatctcactgggtctagtctcatctcagacaacccccacccccactgtttctggggttccctttctcatctctcccaccctgtctcctgcctctgtctttcttggtgtctgtctgggcttctttctgtctctttctgtctttctgtctctctccctacccccgctccctctttccagtgctctggctggctgtctctccctttctccccctctctctctgccttaggctctgtctccaccgcagggcccaaggtgaaagtcctccccttgccggaggccagctggcagggcctttcgtggctggaagtggccagtttggttccggtgctgacccctaggccccagcgcagctgcctcccgtgctgtctgtctccccctctctgtttatgtctgcgctgtgtctcacactcagagcctccttgcttctgttaggttcccatctctccttctgcctcactctgggcctcttctttctacttgtacatttccacctctctaggcctctgctctcactgtccctctctgtctgtctctcagcctttatctctgggttttgatcccccactccaggctctgggccccttcttcccccttccctcaaacctggctgctataggcagcagaaccctgaccactgagtaatacagccccaggggagggaggagaccccaggcagggaggatgggggcagctctcttctctccccaggacccaggctgtggatcacggggcctgccagcttgagtgtagagggaggggggactctacccttctcagccccaccagcccccctctgcccaaccacaattttcccttcctccgccttcctctccctctcctgtttacactccccaaatgcgcacaggctgttatcatgggtcctgagtcatcccacacacagcctgccccagcgtccctgcccccagctggccgcagggcccgccccatggagccccctgccgccctgggctaatgggagccagatggccgcctggtgactcagccaccgggcctgtgggaacccaggcgtcccgccttcccatgcccccacacccggctcctgctcccccagcagacacacacaggagggcctggccactgttgagggggcacacagggcaagggtcaccaagtcggggcctagggactcctcatgcctctgagatggaatggtggtatcctgccgtggccaagcctgaaggaccctcaaaactgcctcctggagtccacggttcctgacctccgagcctcagctatgccctctgggtcaaccagaattagagccagacagggaaagtgagagctggatggaggcagacaagatgctcagagcgactattaaagaacgaaagcctctgctacggagcgcttctgtcctctgtcaggcccgagcgaagtgcctgacaccgggttggatcctcagatggccccatgaactagtgaagtgggtcaaaggaggcctggaaagatgttgcttcctcaaggccactcggccatcagaggcagaaatgaaacaggaacccaggcctagaatcacaaaggtcctagaaaccacttggctgtctggcctctcaggtgtcagggccatccagagtgagacagcattggagggacaagtgtgcatgcagatgtcctcagacgggaaggtttgagaagggtcagatggtaggcgggcctaacaagggctccgtgctagccactgtcccgcacacagacaggatcaggtcatcttgatatggagatcagtccccaaatcactgaattgtcccagcagtgctatgccctaggtactaccaatatcactcctctatttcccagaggaggaagcagcagctagactccaggaccttggggtcatatctctcagaaagccaagagtgcaggatgagagctgtctgtctcttacctgcctgtatttgtgccccatttttaaagagcagagggcctgggccacaggaaaggtatcagcccttggtgataggcacattttttaccagtctatcatttggtcattaaatttgtttacaatatactttgctataaaaaaaaaaaaaaaaaaaaaaa

SEQ ID NO: 5452 - protein, 343 aa, Homo sapiens
MEAVATATAAKEPDKGCIEPGPGHWGELSRTPVPSKPQDKVEAAEATPVALDSDTSGAENAAVSAMLHAVAASRLPVCSQQQGEPDLTEHEKVAILAQLYHEKPLVFLERFRTGLREEHLACFGHVRGDHRADFYCAEVARQGTARPRTLRTRLRNRRYAALRELIQGGEYFSDEQMRFRAPLLYEQYIGQYLTQEELSARTPTHQPPKPGSPGRPACPLSNLLLQSYEERELQQRLLQQQEEEEACLEEEEEEEDSDEEDQRSGKDSEAWVPDSEERLILREEFTSRMHQRFLDGKDGDFDYSTVDDNPDFDNLDIVARDEEERYFDEEEPEDAPSPELDGD

SEQ ID NO: 5453 - DNA, 2741 bp, Homo sapiens
acctccctccgcggagcagccagacagcgagggccccggccgggggcaggggggacgccccgtccggggcacccccccggctctgagccgcccgcggggccggcctcggcccggagcggaggaaggagtcgccgaggagcagcctgaggccccagagtctgagacgagccgccgccgcccccgccactgcggggaggagggggaggaggagcgggaggagggacgagctggtcgggagaagaggaaaaaaacttttgagacttttccgttgccgctgggagccggaggcgcggggacctcttggcgcgacgctgccccgcgaggaggcaggacttggggaccccagaccgcctccctttgccgccggggacgcttgctccctccctgccccctacacggcgtccctcaggcgcccccattccggaccagccctcgggagtcgccgacccggcctcccgcaaagacttttccccagacctcgggcgcaccccctgcacgccgccttcatccccggcctgtctcctgagcccccgcgcatcctagaccctttctcctccaggagacggatctctctccgacctgccacagatcccctattcaagaccacccaccttctggtaccagatcgcgcccatctaggttatttccgtgggatactgagacacccccggtccaagcctcccctccaccactgcgcccttctccctgaggacctcagctttccctcgaggccctcctaccttttgccgggagacccccagcccctgcaggggcggggcctccccaccacaccagccctgttcgcgctctcggcagtgccggggggcgccgcctcccccatgccgccctccgggctgcggctgctgccgctgctgctaccgctgctgtggctactggtgctgacgcctggccggccggccgcgggactatccacctgcaagactatcgacatggagctggtgaagcggaagcgcatcgaggccatccgcggccagatcctgtccaagctgcggctcgccagccccccgagccagggggaggtgccgcccggcccgctgcccgaggccgtgctcgccctgtacaacagcacccgcgaccgggtggccggggagagtgcagaaccggagcccgagcctgaggccgactactacgccaaggaggtcacccgcgtgctaatggtggaaacccacaacgaaatctatgacaagttcaagcagagtacacacagcatatatatgttcttcaacacatcagagctccgagaagcggtacctgaacccgtgttgctctcccgggcagagctgcgtctgctgaggctcaagttaaaagtggagcagcacgtggagctgtaccagaaatacagcaacaattcctggcgatacctcagcaaccggctgctggcacccagcgactcgccagagtggttatcttttgatgtcaccggagttgtgcggcagtggttgagccgtggaggggaaattgagggctttcgccttagcgcccactgctcctgtgacagcagggataacacactgcaagtggacatcaacgggttcactaccggccgccgaggtgacctggccaccattcatggcatgaaccggcctttcctgcttctcatggccaccccgctggagagggcccagcatctgcaaagctcccggcaccgccgagccctggacaccaactattgcttcagctccacggagaagaactgctgcgtgcggcagctgtacattgacttccgcaaggacctcggctggaagtggatccacgagcccaagggctaccatgccaacttctgcctcgggccctgcccctacatttggagcctggacacgcagtacagcaaggtcctggccctgtacaaccagcataacccgggcgcctcggcggcgccgtgctgcgtgccgcaggcgctggagccgctgcccatcgtgtactacgtgggccgcaagcccaaggtggagcagctgtccaacatgatcgtgcgctcctgcaagtgcagctgaggtcccgccccgccccgccccgccccggcaggcccggccccaccccgccccgcccccgctgccttgcccatgggggctgtatttaaggacacccgtgccccaagcccacctggggccccattaaagatggagagaggactgcggatctctgtgtcattgggcgcctgcctggggtctccatccctgacgttcccccactcccactccctctctctccctctctgcctcctcctgcctgtctgcactattcctttgcccggcatcaaggcacaggggaccagtggggaacactactgtagttagatctatttattgagcaccttgggcactgttgaagtgccttacattaatgaactcattcagtcaccatagcaacactctgagatgcagggactctgataacacccattttaaaggtgaggaaacaagcccagagaggttaagggaggagttcctgcccaccaggaacctgctttagtgggggatagtgaagaagacaataaaagatagtagttcaggccaggcggggtggctcacgcctgtaatcctagcacttttgggaggcagagatgggaggattacttgaatccaggcatttgagaccagcctgggtaacatagtgagaccctatctctacaaaacacttttaaaaaatgtacacctgtggtcccagctactctggaggctaaggtgggaggatcacttgatcctgggaggtcaaggctgcag

SEQ ID NO: 5454 - DNA, 1011 bp, Homo sapiens
cagccgcacgtgggctcggcgcgatggaggaggagacgcatactgacgccaaaatccgtgctgaaaatggaacagggtccagccctcggggtcctggctgcagcctccggcactttgcctgcgaacagaacctgctgtcgcggccagatggctctgcttccttcctgcaaggtgacacctctgtcctggcgggtgtgtacgggccggccgaggtgaaggtcagcaaagagattttcaacaaggccacactcgaagtgatcctgaggccgaagattgggctgcctggtgttgcagagaagagccgggagcggctgatcaggaacacgtgcgaggcggtggtgctgggcacgttgcacccccgcacctccatcaccgtggtgctgcaggttgtcagcgatgccggctctctcctggcctgttgtctgaatgccgcctgcatggcattggtggatgcaggtgtgcccatgcgggctctcttctgtggggtcgcctgcgccctggactctgatgggaccctcgtgctggatcctacatccaagcaagaaaaggaggcccgggcagtcctgacctttgccctggacagcgtggaacggaagctgctgatgtccagcaccaaggggctctactcagacactgagctccagcagtgcctggctgcggcccaggccgcttcgcaacacgtcttccgtttctaccgggaatcgctgcagaggcgttactccaagagctgaggcaagctggggcaaggggccgctcccattgcctccacccactcaccccctacagcctgaagcaaaccagcagcccagccttgcctctctgacccatgggctccttgagcctgcagctctgtaaccacagggctcctgtggggaggccttggcctgtgacagcccccaggcctgggggcacagatccccccagcaaggataacattcaaaggagctcacatttatggaatggatgaatcaataaattaattcactttaaaaaaaaaaaaaaaaaaaaaaa

SEQ ID NO: 5455 - protein, 235 aa, Homo sapiens
MEEETHTDAKIRAENGTGSSPRGPGCSLRHFACEQNLLSRPDGSASFLQGDTSVLAGVYGPAEVKVSKEIFNKATLEVILRPKIGLPGVAEKSRERLIRNTCEAVVLGTLHPRTSITVVLQVVSDAGSLLACCLNAACMALVDAGVPMRALFCGVACALDSDGTLVLDPTSKQEKEARAVLTFALDSVERKLLMSSTKGLYSDTELQQCLAAAQAASQHVFRFYRESLQRRYSKS

SEQ ID NO: 5456 - DNA, 1741 bp, Homo sapiens
gttagccaagatggcggtagcgatcgctgcagcgagggtctggcggctaaaccgtggtttgagccaggctgccctcctgctgctgcggcagcctggggctcggggactggctagatctcacccccccaggcagcagcagcagttttcatctctggatgacaagccccagttcccaggggcctcggcggagtttatagataagttggaattcatccagcccaacgtcatctctggaatccccatctaccgcgtcatggaccggcaaggccagatcatcaaccccagcgaggacccccacctgccgaaggagaaggtgctgaagctctacaagagcatgacactgcttaacaccatggaccgcatcctctatgagtctcagcggcagggccggatctccttctacatgaccaactatggtgaggagggcacgcacgtggggagtgccgccgccctggacaacacggacctggtgtttggccagtaccgggaggcaggtgtgctgatgtatcgggactaccccctggaactattcatggcccagtgctatggcaacatcagtgacttgggcaaggggcgccagatgcctgtccactacggctgcaaggaacgccacttcgtcactatctcctctccactggccacgcagatccctcaggcggtgggggcggcgtacgcagccaagcgggccaatgccaacagggtcgtcatctgttacttcggcgagggggcagccagtgagggggacgcccatgccggcttcaacttcgctgccacacttgagtgccccatcatcttcttctgccggaacaatggctacgccatctccacgcccacctctgagcagtatcgcggcgatggcattgcagcacgaggccccgggtatggcatcatgtcaatccgcgtggatggtaatgatgtgtttgccgtatacaacgccacaaaggaggcccgacggcgggctgtggcagagaaccagcccttcctcatcgaggccatgacctacaggatcgggcaccacagcaccagtgacgacagttcagcgtaccgctcggtggatgaggtcaattactgggataaacaggaccaccccatctcccggctgcggcactatctgctgagccaaggctggtgggatgaggagcaggagaaggcctggaggaagcagtcccgcaggaaggtgatggaggcctttgagcaggccgagcggaagcccaaacccaaccccaacctactcttctcagacgtgtatcaggagatgcccgcccagctccgcaagcagcaggagtctctggcccgccacctgcagacctacggggagcactacccactggatcacttcgataagtgagacctgctcagcccacccccacccatcctcagctaccccgagaggtagccccactctaaggggagcagggggacctgacagcacaccactgtcttccccagtcagctccctctaaaatactcagcggccagggcggctgccactcttcacccctgctcctcccggctgttacattgtcaggggacagcatctgcagcagttgctgaggctccgtcagccccctcttcacctgttgttacagtgccttctcccaggggctgggtgagggcacattcaggactagaagcccctctgggcatggggtggacatggcaggtcagcctgtggaacttgcgcaggtgcgagtggccagcagaggtcacgaataaactgcatctctgcgcctggctctct

SEQ ID NO: 5457 - protein, 445 aa, Homo sapiens
MAVAIAAARVWRLNRGLSQAALLLLRQPGARGLARSHPPRQQQQFSSLDDKPQFPGASAEFIDKLEFIQPNVISGIPIYRVMDRQGQIINPSEDPHLPKEKVLKLYKSMTLLNTMDRILYESQRQGRISFYMTNYGEEGTHVGSAAALDNTDLVFGQYREAGVLMYRDYPLELFMAQCYGNISDLGKGRQMPVHYGCKERHFVTISSPLATQIPQAVGAAYAAKRANANRVVICYFGEGAASEGDAHAGFNFAATLECPIIFFCRNNGYAISTPTSEQYRGDGIAARGPGYGIMSIRVDGNDVFAVYNATKEARRRAVAENQPFLIEAMTYRIGHHSTSDDSSAYRSVDEVNYWDKQDHPISRLRHYLLSQGWWDEEQEKAWRKQSRRKVMEAFEQAERKPKPNPNLLFSDVYQEMPAQLRKQQESLARHLQTYGEHYPLDHFDK

SEQ ID NO: 5458 - DNA, 1692 bp, Homo sapiens
agcaagatggcggctccctgggcgtccctgcgcctggtcgcccccatgtggaatgggcgtatcaggggcatccatcgcctgggtgcggcagtggccccagagggcagtcagaagaagaaaaggacaatactccagttcctgaccaactatttctacgatgtggaggctctgagggattacttgctccaaagggagatgtacaaggtgcatgagaaaaatcgatcttacacctggctggagaagcaacatggtccatacggcgcaggtgcctttttcatcctgaagcagggaggcgcagtcaagtttcgagacaaggagtggatcaggccagataagtatggccatttctctcaggagttctggaatttctgtgaagtgcctgtcgaagctgtggatgccggtgactgtgacatcaactacgagggcctggataacctcctccgcctgaaggagctccagtccttgtcgctgcagcgctgctcccacgtggacgactggtgtctcagccgcctctacccactggccgactcgttgcaggagctctcgctggccggttgcccccgcatctccgaacggggcctcgcctgcctccaccacctccagaacctccgcaggctggacatctcggacctccctgccgtgtccaaccctggcctcactcagatattggtggaggagatgctgcccaattgcgaggttgtgggagtcgactgggctgagggcctgaagtcagggccggaggagcagcctcgggacacagccagccctgtccctgcctagcctttagccctgtccccactcacgtggcttctcagcgggctgcatggaatgtctggtagctcaccacacttctggcttccatttgtcttcactcaacgtcagggtgggggagtggtgctggccaatcacaggagagagcgtgagttcccagtatttattcctggctgcccttggctaaaggtcacagctcctgtcaccctgtcaggcagccctttccatgcccctgttcaggcctggggaggtaaaggctcaggctgttagtagccgcagagagccacactcaccttgtcaggagactcttctcaaactgtccttatgtgagtgcactgccatttcttgcagggaccctgactgacacaggggctactactgacactttacagggatggttctcccccgtgcagggccgctgtgcccactgcaggacatgcagcatccttcgccccactccactcactaaaggccagcgcaccccaggccccatagtattgctggttatggatttattgactttatgttccaaattcagctttttcagttggcagttttttgaaaggggataagctttgtcagtagagggcaccaaacaggcattataggaggaaaggcgcctccttcgtggttcttgttggttgtgcttctgcctctggacgccgcagtgcatgtggcttccccagcacccagctcctgaagcaccaggcggtcagcagctgcccttggcaccctccagccctcagaagttgcgtaggagacacagcgcctccactgaggcacctctctgggaataacgttccccagcaccccaaatggatttccagtcaattcagaagcattttaccagtgaagccctcattattccagttcactgttaaagccagtaattctctatattaaactttccctgttcaagtt

SEQ ID NO: 5459 - protein, 257 aa, Homo sapiens
MAAPWASLRLVAPMWNGRIRGIHRLGAAVAPEGSQKKKRTILQFLTNYFYDVEALRDYLLQREMYKVHEKNRSYTWLEKQHGPYGAGAFFILKQGGAVKFRDKEWIRPDKYGHFSQEFWNFCEVPVEAVDAGDCDINYEGLDNLLRLKELQSLSLQRCSHVDDWCLSRLYPLADSLQELSLAGCPRISERGLACLHHLQNLRRLDISDLPAVSNPGLTQILVEEMLPNCEVVGVDWAEGLKSGPEEQPRDTASPVPA

SEQ ID NO: 5460 - DNA, 972 bp, Homo sapiens
ggaggctgcaacgccgatcggaggaggcaggaaccggagctctagcagtagctgggtgggcaccatggctgggatcaccaccatcgaggcggtgaagcgcaagatccaggttctgcagcagcaggcagatgatgcagaggagcgagctgagcgcctccagcgagaagttgagggagaaaggtgggcccgggaacaggctgaggctgaggtggcctccttgaacgtgggatccagctggttgaagaggagctggaccgtgctcaggagcacctggctactgccctgcaaaagctggaagaagcggaaaaagctgctgatgagagtgagagaggtaagaaggttattgaaaaccgggccttaaaagatgaagaaaagatggaactccaggaaatccaactcagagaagctaagcacattgcagaagaggcagataggaagtatgaagaggtggctcgtaagttggtgatcattgaaggagacttggaacgcacagaggaacgagctgagctggcagaatccctactctcaaaaagaagacaaatatgaggaagagatcaagattcttactgataaaataaaggaggcggagacccatgctgagtttgctgagagatcggtagccaagctggaaaagacaattgatgacttggaagataaactgaaatgcaccaaaggggagcacctctgtacacaaaggatgctggaccagactctttctcctttcgccgccccctccttccgccgcccgctccttccctgtatcttttaaagtttctttccctaccctgtccccattttctggtaaggtttctaggaggtctgttaggtgtacatcctacagcttattggcttaatatgtactctcctttgatgtggtctacttggggccgattgggagaaagagaaatcaatagtgcaactgttttgataatgaatattgacaagtgtctttttgaaataaagaaccagtcc

SEQ ID NO: 5461 - DNA, 757 bp, Homo sapiens
acgccgatcggaggaggcaggaaccggagctctagcagtagctgggtgggcaccatggctgggatcaccaccatcgaggcggtgaagcgcaagatccaggttctgcagcagcaggcagatgatgcagaggagcgagctgagcgcctccagcgagaagttgagggagaaaggtgggcccgggaacaggctgaggctgaggtggcctccttgaacgtgggatccagctggttgaagaggagctggaccgtgctcaggagcacctggctactgccctgcaaaagctggaagaagcggaaaaagctgctgatgagagtgagagaggtaagaaggttattgaaaaccgggccttaaaagatgaagaaaagatggaactccaggaaatccaactcagagaagctaagcacattgcagaagaggcagataggaagtatgaagaggtggctcgtaagttggtgatctttaactggaaggctgctttctcctttcgccgccccctccttccgccgcccgctccttccctgtgtctttttcaccaaactgtccgcctcttcccggagattccagctgggctagaggctgagcacctttggaaacaacatttaagggaatgtgagcacaatgcataatgtctttaaaaagtatgttgtgatgtacacattttgtaattacctcttttgttgttttgtagcaaccttttgtaaaacattccatataataccacagccctgaagcagcgatcgaatccctttctcacttt

SEQ ID NO: 5462 - DNA, 770 bp, Homo sapiens
ccgatcggaggaggcaggaaccggagctctagcagtagctgggtgggcaccatggctgggatcaccaccatcgaggcggtgaagcgcaagatccaggttctgcagcagcaggcagatgatgcagaggagcgagctgagcgcctccagcgagaagttgagggagaaaggtgggcccgggaacaggctgaggctgaggtggcctccttgaacgtgggatccagctggttgaagaggagctggaccgtgctcaggagcacctggctactgccctgcaaaagctggaagaagcggaaaaagctgctgatgagagtgagagaggtaagaaggttattgaaaaccgggccttaaaagatgaagaaaagatggaactccaggaaatccaactcagagaagctaagcacattgcagaagaggcagataggaagtatgaagaggtggctcgtaagttggtgatcattgaaggagacttggaacgcacagaggaacgagctgagctggcagaatccctttgccgagagatggatgagcagattagactgatggaccagaacctgaagtgtctgagtgctgctgaagaaaagtactctcaaaaagaagacaaatatgaggaagaaaagaagattgtgtttttgccactgatttagccatgtgaaactcatctcattacccttttctgagtttgaagctgctgtctctacaagtgccatctcattgtgctttgtatcagtcagtgctggagaaatcttgaatagcttatgtacaaaactttt

SEQ ID NO: 5463 - DNA, 742 bp, Homo sapiens
tcaccaccatcgaggcggtgaagcgcaagatccaggttctgcagcagcaggcagatgatgcagaggagcgagctgagcgcctccagcgagaagttgagggagaaaggtgggcccgggaacagaggtaagaaggttattgaaaaccgggccttaaaagatgaagaaaagatggaactccaggaaatccaactcagagaagctaagcacattgcagaagaggcagataggaagtatgaagaggtggctcgtaagttggtgatcattgaaggagacttggaacgcacagaggaacgagctgagctggcagaatccctttgccgagagatggatgagcagattagactgatggaccagaacctgaagtgtctgagtgctgctgaagaaaagtactctcaaaaagaagacaaatatgaggaagagatcaagattcttactgataaaataaaggaggcggagacccatgctgagtttgctgagagatcggtagccaagctggaaaagacaattgatgacttggaagataaactgaaatgcaccaaaggggagcacctctgtacacaaaggatgctggaccagactctgcttgacctgaatgagatgtagaacgcctcagtctcaccctgctgctgctcctccctcttcccggagattccagctgggctagaggctgagcacctttggaaacaacatttaagggaatgtgagcacaatgcataatgtctttaaaaagtatgttgtgatg

SEQ ID NO: 5464 - protein, 182 aa, Homo sapiens
MMQRSELSASSEKLREKGGPGNRGKKVIENRALKDEEKMELQEIQLREAKHIAEEADRKYEEVARKLVIIEGDLERTEERAELAESLCREMDEQIRLMDQNLKCLSAAEEKYSQKEDKYEEEIKILTDKIKEAETHAEFAERSVAKLEKTIDDLEDKLKCTKGEHLCTQRMLDQTLLDLNEM

SEQ ID NO: 5465 - DNA, 695 bp, Homo sapiens
gctgaggctgaggtggcctccttgaacgtgggatccagctggttgaagaggagctggaagaagcggaaaaagctgctgatgagagtgagagaggtaagaaggttattgaaaaccgggccttaaaagatgaagaaaagatggaactccaggaaatccaactcagagaagctaagcacattgcagaagaggcagataggaagtatgaagaggtggctcgtaagttggtgatcattgaaggagacttggaacgcacagaggaacgagctgagctggcagaatccctttgccgagagatggatgagcagattagactgatggaccagaacctgaagtgtctgagtgctgctgaagaaaagtactctcaaaaagaagacaaatatgaggaagagatcaagattcttactgataaaataaaggaggcggagacccatgctgagtttgctgagagatcggtagccaagctggaaaagacaattgatgacttggaagataaactgaaatgcaccaaaggggagcacctctgtacacaaaggatgctggaccagactctgcttgacctgaatgagatgtagaacgcctcagtctcaccctgctgctgctcctccctctgaaccagactccgcctgaggccagcctgcccgaagctgacctttaattgagggctgatctttaactggaaggctgctttctccttt

SEQ ID NO: 5466 - DNA, 375 bp, Homo sapiens
atgtctaagtcagagtgtcccgaagagcctgaacagctgaggaagctcttcattggaggattgagctttgaaacaactgataagagcctgagaagccattttgagcaatggagaatgctcacggactgtgtggtggatagaagagttgtggaaccaaagagagctgtctcaagagaagattctcaaagaccagaacatcacctaagagattattttgaacagtatggaaaaattgaagtgactgaaatcatgactgaccgaggcagtggcaagaaaaggggctttgcctttctaacctttgatgaccgtgactccgtgggtggctatggcggttccagtagcagcagtagctatggcagtggcagaagattttaa

SEQ ID NO: 5467 - protein, 124 aa, Homo sapiens
MSKSECPEEPEQLRKLFIGGLSFETTDKSLRSHFEQWRMLTDCVVDRRVVEPKRAVSREDSQRPEHHLRDYFEQYGKIEVTEIMTDRGSGKKRGFAFLTFDDRDSVGGYGGSSSSSSYGSGRRF

SEQ ID NO: 5468 - DNA, 569 bp, Homo sapiens
cgcccgacttgtgcgcccgggaaaccccgtcgttccctttcccctggctggcagcgcggaggccgcacgatgcctggagttactgtaaaagacgtgaaccagcaggagttcgtcagagctctggcagccttcctcaaaaagtccgggaagctgaaagtccccgaatgggtggataccgtcaagctggccaagcacaaagagcttgctccctacgatgagaactggttctacacgcgagctgcttccacagcgcggcacctgtacctccggggtggcgctggggttggctccatgaccaagatctatgggggacgtcagagaaacggcgtcatgcccagccacttcagccgaggctccaagagtgtggcccgccgggtcctccaagccctggaggggctgaaaatggtggaaaaggaccaagatggcggccgcaaactgacacctcagggacaaagagatctggacagaatcgccggacaggtggcagctgccaacaagaagcattagaacaaaccatgctgggttaataaattgcctcattcgtaaaaaaaaaaaaaaaaaaaaaaaaa

SEQ ID NO: 5469 - protein, 145 aa, Homo sapiens [sequence omitted]

SEQ ID NO: 5470 - DNA, 3185 bp, Homo sapiens
gggcgccccgccggtcacttccgcgcggacaccagccttgcagagcccagggagatggaagacttcgcccgaggggcggcctccccaggcccctcccggcctggcctggttcccgtcagcatcatcggggctgaggatgaggattttgagaacgagctggagacaaactcagaagagcaaaacagccagttccagagcctggagcaggtgaagcggcgcccagcccacctcatggccctcctgcagcacgtggccctgcagtttgagccaggacccctgctttgctgtctgcatgccgacatgctgggctcactgggccccaaggaggccaagaaggccttcctggacttctaccacagcttcctggagaagacagcggttctccgggtgccggtccctcccaacgtcgcctttgaacttgaccgcactagggctgacctcatctccgaggatgtccagcggcggttcgtgcaggaggtggtgcaaagccagcaggtagccgtgggccggcagctggaggacttccgttccaagcggctcatgggcatgacgccctgggagcaggagctggcccagctggaggcttgggttgggcgggaccgagccagctacgaggcccgggagcggcacgtggcggagcggctgctcatgcacctggaggagatgcaacataccatctctaccgacgaagaaaagagtgctgccgtggtcaacgccattggcctgtacatgcgccaccttggggtgcggaccaagagtggagacaagaagtcggggaggaacttcttccggaaaaaggtgatggggaaccggcggtcggacgagcctgccaagaccaagaaggggctgagcagcatcctggatgccgcccgctggaaccggggagagccccaggttccagattttcgacacctcaaagcagaggttgatgccgagaagccaggtgctacagaccggaagggaggcgtggggatgccctctcgggaccggaatatcggggctcctgggcaggacacccctggagtctctctgcaccctctgtccctggacagcccagaccgggaaccaggtgctgacgcccccctggagctgggggactcatccccgcagggcccaatgagcctggagtccttggcgcccccagagagtaccgacgagggggccgaaaccgagagccccgagcctggagatgagggggagccggggcggtcgggactggagcttgaaccagaagagcctcccggctggcgggaactcgtccccccagacaccctgcacagcctgcccaagagccaggtgaagcggcaggaggtcatcagcgagctgctggtgacagaggcggcccacgtgcgcatgctgcgggtgctgcacgacctcttcttccagcccatggcagaatgcctgttcttccccttggaggagctgcagaacatcttccccagcctggacgagctcatcgaggtgcattccctgttcctcgatcgcctgatgaagcggaggcaggagagtggctacctcatcgaggagatcggagacgtgctgctggcccggtttgatggtgctgagggctcctggttccagaaaatctcctcccgcttctgcagccgccagtcatttgccttagagcagctcaaagccaagcaacgcaaggaccctcggttctgtgccttcgtgcaggaagctgagagccgcccgcggtgccgccgcctgcagctgaaggacatgatccccacggagatgcagcggctgaccaagtaccccctgctcctgcagagcatcgggcagaacacagaagagcccacagaacgggagaaagtggagctggcagccgagtgctgccgggaaattctacaccacgtcaaccaagccgtgcgtgacatggaggacctgctgaggctcaaggactatcagcggcgcctggacttgtcccaccttcggcagagcagcgaccctatgctgagcgagttcaagaacctggacatcaccaagaagaaattggtccacgagggcccactgacgtggcgggtgactaaggacaaggcagtggaggtgcatgtgctgctgctggacgacctgctgctgctgctccagcgccaggacgagcggctgctgctcaagtcccatagccggacactgacgcccacgcccgatggcaagaccatgctgcggcccgtgctgcggctcacctccgccatgacccgcgaggtggccaccgatcacaaagccttctacgtcctttttacctgggaccaggaggcccagatatacgagctggtggcacagactgtgtcggagcggaaaaactggtgtgctctcatcactgagactgccggatccctgaaagtccctgcccctgcctctcgccctaagccccggcccagcccgagcagcacccgagaacccctcctcagcagctctgagaacggcaatggtggccgagagacgtctccagctgatgcccggaccgagagaatcctcagtgacctcctgcccttctgcagaccaggccccgagggccagctcgctgccacggcccttcggaaagtgctgtccctgaagcagcttctgtttccggcggaggaagacaatggggcggggcctcctcgagatggggatggggtcccagggggcggccccctgagcccagcacggacccaggaaatccaggagaacctgctcagcttggaggagaccatgaagcagctggaggagttggaggaggaattttgccgcctgagacccctcctgtctcagcttggggggaactctgtcccccagcctggctgcacttgaggttcccgcccaggaaggccttttgcaagaaggagaggaatgggggagaggacgtgagggaccacccccacccacacagctgccgcagcatctcacaccccgagggcctgaggagagggagctgtgggccacgcctgggaggggcccagctggggttactggccccgcatgagcctcggccatctctccctcctgccctctgcttgggggactcagggctccattctggagggcaccacggtgacccgggccatctcagtattgcctgtgggggccacccctccacccccacccccaagtgccttcgctctgtttttataccctgaattggagggtttattttttaatatatattatctaagaagaaaaaaaaaaaaaaaaaaaaaaaaaaa

SEQ ID NO: 5471 - protein, 912 aa, Homo sapiens
MEDFARGAASPGPSRPGLVPVSIIGAEDEDFENELETNSEEQNSQFQSLEQVKRRPAHLMALLQHVALQFEPGPLLCCLHADMLGSLGPKEAKKAFLDFYHSFLEKTAVLRVPVPPNVAFELDRTRADLISEDVQRRFVQEVVQSQQVAVGRQLEDFRSKRLMGMTPWEQELAQLEAWVGRDRASYEARERHVAERLLMHLEEMQHTISTDEEKSAAVVNAIGLYMRHLGVRTKSGDKKSGRNFFRKKVMGNRRSDEPAKTKKGLSSILDAARWNRGEPQVPDFRHLKAEVDAEKPGATDRKGGVGMPSRDRNIGAPGQDTPGVSLHPLSLDSPDREPGADAPLELGDSSPQGPMSLESLAPPESTDEGAETESPEPGDEGEPGRSGLELEPEEPPGWRELVPPDTLHSLPKSQVKRQEVISELLVTEAAHVRMLRVLHDLFFQPMAECLFFPLEELQNIFPSLDELIEVHSLFLDRLMKRRQESGYLIEEIGDVLLARFDGAEGSWFQKISSRFCSRQSFALEQLKAKQRKDPRFCAFVQEAESRPRCRRLQLKDMIPTEMQRLTKYPLLLQSIGQNTEEPTEREKVELAAECCREILHHVNQAVRDMEDLLRLKDYQRRLDLSHLRQSSDPMLSEFKNLDITKKKLVHEGPLTWRVTKDKAVEVHVLLLDDLLLLLQRQDERLLLKSHSRTLTPTPDGKTMLRPVLRLTSAMTREVATDHKAFYVLFTWDQEAQIYELVAQTVSERKNWCALITETAGSLKVPAPASRPKPRPSPSSTREPLLSSSENGNGGRETSPADARTERILSDLLPFCRPGPEGQLAATALRKVLSLKQLLFPAEEDNGAGPPRDGDGVPGGGPLSPARTQEIQENLLSLEETMKQLEELEEEFCRLRPLLSQLGGNSVPQPGCT

SEQ ID NO: 5472 - DNA, 3556 bp, Homo sapiens
ccgccgcagcctctgtgcggtgggaccaacggacggacggacggacgcgcgcacctaccgaggcgcgggcgctgcagaggctcccagcccaagcctgagcctgagcccgccccgaggtccccgccccgcccgcctggctctctcgccgcggagccgccaagatgggggacaagaaagatgacaaggactcacccaagaagaacaagggcaaggagcgccgggacctggatgacctcaagaaggaggtggctatgacagagcacaagatgtcagtggaagaggtctgccggaaatacaacacagactgtgtgcagggtttgacccacagcaaagcccaggagatcctggcccgggatgggcctaacgcactcacgccaccgcctaccaccccagagtgggtcaagttttgccggcagctcttcgggggcttctccatcctgctgtggatcggggctatcctctgcttcctggcctacggtatccaggcgggcaccgaggacgacccctctggtgacaacctgtacctgggcatcgtgctggcggccgtggtgatcatcactggctgcttctcctactaccaggaggccaagagctccaagatcatggagtccttcaagaacatggtgccccagcaagccctggtgatccgggaaggtgagaagatgcaggtgaacgctgaggaggtggtggtcggggacctggtggagatcaagggtggagaccgagtgccagctgacctgcggatcatctcagcccacggctgcaaggtggacaactcctccctgactggcgaatccgagccccagactcgctctcccgactgcactcacgacaaccccttggagactcggaacatcaccttcttttccaccaactgtgtggaaggcacggctcggggcgtggtggtggccacgggcgaccgcactgtcatgggccgtatcgccaccctggcatcagggctggaggtgggcaagacgcccatcgccatcgagattgagcacttcatccagctcatcaccggcgtggctgtcttcctgggtgtctccttcttcatcctctccctcattctcggatacacctggcttgaggctgtcatcttcctcatcggcatcatcgtggccaatgtcccagagggtctgctggccactgtcactgtgtgtctgacgctgaccgccaagcgcatggcccggaagaactgcctggtgaagaacctggaggctgtagaaaccctgggctccacgtccaccatctgctcagataagacagggaccctcactcagaaccgcatgacagtcgcccacatgtggtttgacaaccagatccacgaggctgacaccactgaggaccagtcagggacctcatttgacaagagttcgcacacctgggtggccctgtctcacatcgctgggctctgcaatcgcgctgtcttcaagggtggtcaggacaacatccctgtgctcaagagggatgtggctggggatgcgtctgagtctgccctgctcaagtgcatcgagctgtcctctggctccgtgaagctgatgcgtgaacgcaacaagaaagtggctgagattcccttcaattccaccaacaaataccagctctccatccatgagaccgaggaccccaacgacaaccgatacctgctggtgatgaagggtgcccccgagcgcatcctggaccgctgctccaccatcctgctacagggcaaggagcagcctctggacgaggaaatgaaggaggccttccagaatgcctaccttgagctcggtggcctgggcgagcgcgtgcttggtttctgccattattacctgcccgaggagcagttccccaagggctttgccttcgactgtgatgacgtgaacttcaccacggacaacctctgctttgtgggcctcatgtccatgatcgacccaccccgggcagccgtccctgacgcggtgggcaagtgtcgcagcgcaggcatcaaggtcatcatggtcaccggcgatcaccccatcacggccaaggccattgccaagggtgtgggcatcatctctgagggcaacgagactgtggaggacatcgccgcccggctcaacattcccgtcagccaggttaacccccgggatgccaaggcctgcgtgatccacggcaccgacctcaaggacttcacctccgagcaaatcgacgagatcctgcagaatcacaccgagatcgtcttcgcccgcacatccccccagcagaagctcatcattgtggagggctgtcagagacagggtgcaattgtggctgtgaccggggatggtgtgaacgactcccccgctctgaagaaggccgacattggggtggccatgggcatcgctggctctgacgtctccaagcaggcagctgacatgatcctgctggacgacaactttgcctccatcgtcacaggggtggaggagggccgcctgatcttcgacaacctaaagaagtccattgcctacaccctgaccagcaatatcccggagatcacgcccttcctgctgttcatcatggccaacatcccgctgcccctgggcaccatcaccatcctctgcatcgatctgggcactgacatggtccctgccatctcactggcgtacgaggctgccgaaagcgacatcatgaagagacagcccaggaacccgcggacggacaaattggtcaatgagagactcatcagcatggcctacgggcagattggaatgatccaggctctcggtggcttcttctcttactttgtgatcctggcagaaaatggcttcttgcccggcaacctggtgggcatccggctgaactgggatgaccgcaccgtcaatgacctggaagacagttacgggcagcagtggacatacgagcagaggaaggtggtggagttcacctgccacacggccttctttgtgagcatcgttgtcgtccagtgggccgatctgatcatctgcaagacccggaggaactcggtcttccagcagggcatgaagaacaagatcctgatcttcgggctgtttgaggagacggccctggctgccttcctgtcctactgccccggcatggacgtggccctgcgcatgtaccctctcaagcccagctggtggttctgtgccttcccctacagtttcctcatcttcgtctacgacgaaatccgcaaactcatcctgcgcaggaacccagggggttgggtggagaaggaaacctactactgacctcagccccaccacatcgcccatctcttccccgtcccccaggcccaggaccgcccctgtcagtccccccaattttgtattctggggggaggagccctctcttcctgtggccccaccttggcccccaccccctccactatctcctgccgcccccactctggctggcttctctcccctgccccaaacctctctcctctctcttttctgtgtcagtttctctccctctcctcacccctctatccattcctcccgccccagccacctccctgggctcttttttactccccttcagccccccggctgatgccatctctggttctggacaattatcaaatatatcagtggggagagag

SEQ ID NO: 5473 - protein, 1013 aa, Homo sapiens
MGDKKDDKDSPKKNKGKERRDLDDLKKEVAMTEHKMSVEEVCRKYNTDCVQGLTHSKAQEILARDGPNALTPPPTTPEWVKFCRQLFGGFSILLWIGAILCFLAYGIQAGTEDDPSGDNLYLGIVLAAVVIITGCFSYYQEAKSSKIMESFKNMVPQQALVIREGEKMQVNAEEVVVGDLVEIKGGDRVPADLRIISAHGCKVDNSSLTGESEPQTRSPDCTHDNPLETRNITFFSTNCVEGTARGVVVATGDRTVMGRIATLASGLEVGKTPIAIEIEHFIQLITGVAVFLGVSFFILSLILGYTWLEAVIFLIGIIVANVPEGLLATVTVCLTLTAKRMARKNCLVKNLEAVETLGSTSTICSDKTGTLTQNRMTVAHMWFDNQIHEADTTEDQSGTSFDKSSHTWVALSHIAGLCNRAVFKGGQDNIPVLKRDVAGDASESALLKCIELSSGSVKLMRERNKKVAEIPFNSTNKYQLSIHETEDPNDNRYLLVMKGAPERILDRCSTILLQGKEQPLDEEMKEAFQNAYLELGGLGERVLGFCHYYLPEEQFPKGFAFDCDDVNFTTDNLCFVGLMSMIDPPRAAVPDAVGKCRSAGIKVIMVTGDHPITAKAIAKGVGIISEGNETVEDIAARLNIPVSQVNPRDAKACVIHGTDLKDFTSEQIDEILQNHTEIVFARTSPQQKLIIVEGCQRQGAIVAVTGDGVNDSPALKKADIGVAMGIAGSDVSKQAADMILLDDNFASIVTGVEEGRLIFDNLKKSIAYTLTSNIPEITPFLLFIMANIPLPLGTITILCIDLGTDMVPAISLAYEAAESDIMKRQPRNPRTDKLVNERLISMAYGQIGMIQALGGFFSYFVILAENGFLPGNLVGIRLNWDDRTVNDLEDSYGQQWTYEQRKVVEFTCHTAFFVSIVVVQWADLIICKTRRNSVFQQGMKNKILIFGLFEETALAAFLSYCPGMDVALRMYPLKPSWWFCAFPYSFLIFVYDEIRKLILRRNPGGWVEKETYY

SEQ ID NO: 5474 - DNA, 2236 bp, Homo sapiens
cccgagtctcaggagcctgccttacagcaggaggtgcaggcctcgtcacctgcagaggtgcctgtgtctcagcctgaccccttgccagcttctgaccacagttacgagctgcgcaatggtgaagccattgggcgggatcgccgggggcgcagggcccggaggaacaacagtggagaagcaggcggggcagccacacaggagctcttctgctcagcctgtgaccagctctttctctcaccccaccagctacagcagcacctgcggagtcaccgggagggcgtctttaagtgccccctgtgcagtcgtgtcttccctagcccttccagtctggaccagcaccttggagaccatagcagcgagtcacacttcctgtgtgtagactgtggcctggccttcggcacagaggccctcctcctggcccaccggcgagcccacaccccgaatcctctgcattcatgtccatgtgggaagacctttgtcaaccttaccaagttcctttatcaccggcgtactcatggggtagggggtgtccctctgcccacaacaccagtcccaccagaggaacctgtcattggtttccctgagccagccccagcagagactggagagccagaggcccctgagccccctgtgtctgaggagacctcagcagggcccgctgccccaggcacctaccgctgcctcctgtgcagccgtgaatttggaaaggccttgcagctgacccggcaccaacgttttgtgcatcggctggagcggcgccataaatgcagcatttgtggcaagatgttcaagaagaagtctcacgtgcgtaaccacctgcgcacacacacaggggagcggcccttcccctgccctgactgctccaagcccttcaactcacctgccaacctggcccgccaccggctcacacacacaggagagcggccctaccggtgtggggactgtggcaaggctttcacgcaaagctccacactgaggcagcaccgcttggtgcatgcccagcacttcccctaccgctgccaggaatgtggggtgcgttttcaccgtccttaccgcctgctcatgcaccgctaccatcacacaggtgaatacccctacaagtgtcgcgagtgcccccgctccttcttgctgcgtcggctgctggaggtgcaccagctcgtggtccatgccgggcgccagccccaccgctgcccatcctgtggggctgccttcccctcctcactgcggctccgggagcaccgctgtgcagccgctgctgcccaggccccacggcgctttgagtgtggcacctgtggcaagaaagtgggctcagctgctcgactgcaggcacacgaggcggcccatgcagctgctgggcctggagaggtcctggctaaggagccccctgcccctcgagccccacgggccactcgtgcaccagttgcctctccagcagcccttggaagcactgctacagcatcccctgcggcccctgcccgccgccggggtctagagtgcagcgagtgcaagaagctgttcagcacagagacgtcactgcaggtgcaccggcgcatccacacaggtgagcggccatacccatgtccagactgtggcaaagcgttccgtcagagtacccacctgaaagaccaccggcgcctgcacacaggtgagcggccctttgcctgtgaagtgtgtggcaaggcctttgccatctccatgcgcctggcagaacatcgccgcatccacacaggcgaacgaccctactcctgccctgactgtggcaagagctaccgctccttctccaacctctggaagcaccgcaagacccatcagcagcagcatcaggcagctgtgcggcagcagctggcagaggcggaggctgccgttggcctggccgtcatggagactgctgtggaggcgctacccctggtggaagccattgagatctaccctctggccgaggctgagggggtccagatcagtggctgactctgcccgacttcctctttggcacctccattccctgttgctgaaggccctccagcatccccttaagcatctgtacatactgtgtcccttcctcttcccatccccaccaccttgtaagttctaaattggatttattctctcgtgaggggggtgctctggggtccttgacacacataaaggtgcccccccaccttccacctcttagcactggtgaccccaaaaatgaaaccatcaataaagactgggttgccaaaaaaaaaaaaaaaaa

SEQ ID NO: 5475 - protein, 394 aa, Homo sapiens
MFKKKSHVRNHLRTHTGERPFPCPDCSKPFNSPANLARHRLTHTGERPYRCGDCGKAFTQSSTLRQHRLVHAQHFPYRCQECGVRFHRPYRLLMHRYHHTGEYPYKCRECPRSFLLRRLLEVHQLVVHAGRQPHRCPSCGAAFPSSLRLREHRCAAAAAQAPRRFECGTCGKKVGSAARLQAHEAAHAAAGPGEVLAKEPPAPRAPRATRAPVASPAALGSTATASPAAPARRRGLECSECKKLFSTETSLQVHRRIHTGERPYPCPDCGKAFRQSTHLKDHRRLHTGERPFACEVCGKAFAISMRLAEHRRIHTGERPYSCPDCGKSYRSFSNLWKHRKTHQQQHQAAVRQQLAEAEAAVGLAVMETAVEALPLVEAIEIYPLAEAEGVQISG

SEQ ID NO: 5476 - DNA, 2667 bp, Homo sapiens
tctgagaggcgaggccgggtgaggcggcgagggcggcccgacgggcgcgggacgggacggggcagcgagggcgccgggagccgcggcccggaatcggggcgcttcgccccgggccccccagcatgaagaccccggcggacacagggtttgccttcccggattgggcctacaagccagagtcgtcccctggctcaaggcagatccagctgtggcactttatcctggagctgctgcggaaggaggagtaccagggcgtcattgcctggcagggggactacggggaattcgtcatcaaagaccctgatgaggtggcccggctgtggggcgttcgcaagtgcaagccccagatgaattacgacaagctgagccgggccctgcgctattactataacaagcgcattctgcacaagaccaaggggaaacggttcacctacaagttcaatttcaacaaactggtgctggtcaattacccattcattgatgtggggttggctgggggtgcagtgccccagagtgccccgccagtgccgtcgggtggtagccacttccgcttccctccctcaacgccctccgaggtgctgtcccccaccgaggacccccgctcaccaccagcctgctcttcatcttcatcttccctcttctcggctgtggtggcccgccgcctgggccgaggctcagtcagtgactgtagtgatggcacgtcagagctggaggaaccgctgggagaggatccccgcgcccgaccacccggccctccggatctgggtgccttccgagggcccccgctggcccgcctgccccatgaccctggtgtcttccgagtctatccccggcctcggggtggccctgaacccctcagccccttccctgtgtcgcctctggccggtcctggatccctgctgccccctcagctctccccggctctgcccatgacgcccacccacctggcctacactccctcgcccacgctgagcccgatgtaccccagtggtggcggggggcccagcggctcagggggaggctcccacttctccttcagccctgaggacatgaaacggtacctgcaggcccacacccaaagcgtctacaactaccacctcagcccccgcgccttcctgcactaccctgggctggtggtgccccagccccagcgccctgacaagtgcccgctgccgcccatggcacccgagaccccaccggtcccctcctcggcctcgtcatcctcttcttcttcttcctccccattcaagtttaagctccagcggcccccactcggacgccggcagcgggcagctggggagaaggccgtagccgctgctgacaagagcggtggcagtgcaggcgggctggctgagggggcaggggcgctagccccaccgcccccgccaccacagatcaaggtggagcccatctcggaaggcgagtcggaggaggtagaggtgactgacatcagtgatgaggatgaggaagacggggaggtgttcaagacgccccgtgccccacctgcaccccctaagcctgagcccggcgaggcacccggggcatcccagtgcatgcccctcaagctacgctttaagcggcgctggagtgaagactgtcgcctcgaagggggtgggggccccgctgggggctttgaggatgagggtgaggacaagaaggtgcgtggggaggggcctggggaggctggggggcccctcaccccaaggcgggtgagctctgacctccagcatgccacggcccagctctccctggagcaccgagactcctgagggctgtgggcaggggacctgtgtgccccgcaccccccatgcttcttttgctgccttaagccccctatgccctggaggtgagggcagctctcttgtctcttccctgcctcctcccttttccctccccacattttgtataaaactttaatttcttttttttaaaaatggtgggggtgggtgggtgcccagggctaggggctattccctgtctctgtgggtttctaagctctgggcaaattggtggtagggggagggagggggaagttaagggggtcacctccattctggggaatttatatttgaattgaggctttggccttaacacccaggaacttttctattacaatcgcttaggaagtaaagccttgtctccctccctgttctctgcctcttgtacccctctgacccacccgctctgccccactcccagccctcctcagccccagccctgcctgccctgcccctccagggggccatgagtgcctaggtttctcataccccacaaggtcacagcaggggagggagggacaattttataatgaaccaaaaattccatgtgttggggggtggggggcggaggagggtgaggggtgccgcccatgggccacaaatctctacaagtgcctgctatccctctcccactccccaccccagcaccggtccaaccccttcatccccagctgctcctaggactggcccatgggcaggcgggtggggggatgggaagggggtgccctgaaaccaaactggaagccccctctgcctcccagctggggcctctggggtggggtggggggctgtggtcaagccttattctgtattggggactgagggtggggggagtagaggggccgctggagaatgtattcaaaacaataaactttggacctttggaaaa

SEQ ID NO: 5477 - protein, 548 aa, Homo sapiens
MKTPADTGFAFPDWAYKPESSPGSRQIQLWHFILELLRKEEYQGVIAWQGDYGEFVIKDPDEVARLWGVRKCKPQMNYDKLSRALRYYYNKRILHKTKGKRFTYKFNFNKLVLVNYPFIDVGLAGGAVPQSAPPVPSGGSHFRFPPSTPSEVLSPTEDPRSPPACSSSSSSLFSAVVARRLGRGSVSDCSDGTSELEEPLGEDPRARPPGPPDLGAFRGPPLARLPHDPGVFRVYPRPRGGPEPLSPFPVSPLAGPGSLLPPQLSPALPMTPTHLAYTPSPTLSPMYPSGGGGPSGSGGGSHFSFSPEDMKRYLQAHTQSVYNYHLSPRAFLHYPGLVVPQPQRPDKCPLPPMAPETPPVPSSASSSSSSSSSPFKFKLQRPPLGRRQRAAGEKAVAAADKSGGSAGGLAEGAGALAPPPPPPQIKVEPISEGESEEVEVTDISDEDEEDGEVFKTPRAPPAPPKPEPGEAPGASQCMPLKLRFKRRWSEDCRLEGGGGPAGGFEDEGEDKKVRGEGPGEAGGPLTPRRVSSDLQHATAQLSLEHRDS

SEQ ID NO: 5478 - DNA, 2297 bp, Homo sapiens
agccgtgctcagaaagtttctggatcccaggctcatctccacagaggagaacacgcaggcagcagagaccatggggcccatctcagccccttcctgcagatggcgcatcccctggcaggggctcctgctcacagcctcacttttcaccttctggaacccgcccaccactgctcagctcactattgaagctgtgccatccaatgctgcagaggggaaggaggttcttctacttgtccacaatctgccccaggaccctcgtggctacaactggtacaaaggggaaacagtggatgccaaccgtcgaattataggatatgtaatatcaaatcaacagattaccccagggcctgcatacagcaatcgagagacaatataccccaatgcatccctgctgatgcggaacgtcaccagaaatgacacaggatcctacaccctacaagtcataaagctaaatcttatgagtgaagaagtaactggccagttcagcgtacatccggagactcccaagccctccatctccagcaacaactccaaccccgtggaggacaaggatgctgtggccttcacctgtgaacctgagactcagaacacaacctacctgtggtgggtaaatggtcagagtctcccggtcagtcccaggctgcagctgtccaatggcaacaggaccctcactctactcagtgtcacaaggaatgacgtaggaccctatgaatgtgaaatacagaacccagcgagtgcaaacttcagtgacccagtcaccctgaatgtcctctatggcccagatgcccccaccatttccccttcagacacctattaccatgcaggggtaaatctcaacctctcctgccatgcggcctctaatccaccctcacagtattcttggtctgtcaatggcacattccagcaatacacacaaaagctctttatccccaacatcactacaaagaacagcggatcctatgcctgccacaccactaactcagccactggccgcaacaggaccacagtcaggatgatcacagtctctgatgctttagtacaaggaagttctcctggcctctcagctagagccactgtcagcatcatgattggagtactggccagggtggctctgatatagtagctctggtgtagtttctgcatttcaagaagactggcagacagttgtttttattcttcctcaaagcatttgcaatcagctaccattcaaaattgcttcttcttcaagatttatggaaaatactctgacgagtactcttgaacacaagttcctgataactttaagatcacgccactggactgtctatgaacttgcaaacaggctgatacctttgtgaagttgcccaccaaaacacagaaggaaaaaaacatgaatttcattgaactaaataataatgaggataatgtttttaagatttttttttttttttgagatggaatctcgctctgtcgcccaggctggagtgcagtggcacgatctcaactcactgcaagctccgcctcctgggttcacaccattctcctgcctcagcctcctgagtagctgggactacaggcgcctgccacaacgcccggctaattttttgtatttttagtagagacggggtttcactgtggtctcaatctcctgacttcatggtccgcctgcctcagcctcccaaagttctgggattacaggtgtgagccaccgcgcccagcccgtttttaagattttttatttgaaaaattgccaattctttaagtgttttctttttcagatttatgaatttctttatcttttaagctatctataccttactgcaatttggtaaagcagacttttgtgaacaaaaattataacatttacttttgctccctacctgactgccacagaactgggcaactattcatgagtattcatatgtttatggtaattcagttatttgcacaagttcagtgagaatctgctgtctttataatgggatatagtttaaaacattggttatattaccaaggctttgattgggatgttatatttgagaaaatacagagaatgatagattaacggagtgtctaatctatcgtgtcaaccccaaatttttacgtatgagatcctttagtccacccaatggctgacagtaacagcatctttaacacaactctttgttcaaatgtactatggtctcttttagagtcagactcctagactcacttgttctcactgtctgttttaatttaacccaggcatgcaatgctagataataaaattgctccctattggctgatcaaaaaaaaaaaaaaaaaaaaaaaaaaaaaaa

SEQ ID NO: 5479 - protein, 349 aa, Homo sapiens
MGPISAPSCRWRIPWQGLLLTASLFTFWNPPTTAQLTIEAVPSNAAEGKEVLLLVHNLPQDPRGYNWYKGETVDANRRIIGYVISNQQITPGPAYSNRETIYPNASLLMRNVTRNDTGSYTLQVIKLNLMSEEVTGQFSVHPETPKPSISSNNSNPVEDKDAVAFTCEPETQNTTYLWWVNGQSLPVSPRLQLSNGNRTLTLLSVTRNDVGPYECEIQNPASANFSDPVTLNVLYGPDAPTISPSDTYYHAGVNLNLSCHAASNPPSQYSWSVNGTFQQYTQKLFIPNITTKNSGSYACHTTNSATGRNRTTVRMITVSDALVQGSSPGLSARATVSIMIGVLARVALI

SEQ ID NO: 5480 - DNA, 900 bp, Homo sapiens
atgatggcgtatatgaacccggggccccactattctgtcaacgccttggccctaagtggccccagtgtggatctgatgcaccaggctgtgccctacccaagcgcccccaggaagcagcggcgggagcgcaccaccttcacccggagccaactggaggagctggaggcactgtttgccaagacccagtacccagacgtctatgcccgtgaggaggtggctctgaagatcaatctgcctgagtccagggttcaggtttggttcaagaaccggagggctaaatgcaggcagcagcgacagcagcagaaacagcagcagcagcccccagggggccaggccaaggcccggcctgccaagaggaaggcgggcacgtccccaagaccctccacagatgtgtgtccagaccctctgggcatctcagattcctacagtccccctctgcccggcccctcaggctccccaaccacggcagtggccactgtgtccatctggagcccagcctcagagtcccctttgcctgaggcgcagcgggctgggctggtggcctcagggccgtctctgacctccgccccctatgccatgacctacgccccggcctccgctttctgctcttccccctccgcctatgggtctccgagctcctatttcagcggcctagacccctacctttctcccatggtgccccagctagggggcccggctcttagccccctctctggcccctccgtgggaccttccctggcccagtcccccacctccctatcaggccagagctatggcgcctacagccccgtggatagcttggaattcaaggaccccacgggcacctggaaattcacctacaatcccatggaccctctggactacaaggatcagagtgcctggaagtttcagatcttgtag

SEQ ID NO: 5481 - protein, 299 aa, Homo sapiens [sequence omitted]

SEQ ID NO: 5482 - DNA, 1496 bp, Homo sapiens
tgacaagatggcggcaggaggcagtggcgttggtgggaagcgcagctcgaaaagcgatgccgattctggtttcctggggctgcggcccacttcggtggacccagcgctgaggcggcggcggcgaggcccaagaaataagaagcggggctggcggcggcttgctcaggagccgctggggctggaggttgaccagttcctggaagacgtgcggctacaggagcgcacgagcggtggcttgttgtcagaggccccaaatgaaaaactcttcttcgtggacactggctccaaggaaaaagggctgacaaagaagagaaccaaagtccagaagaagtcactgcttctcaagaaaccccttcgggttgacctcatcctcgagaacacatccaaagtccctgcccccaaagacgtcctcgcccaccaggtccccaacgccaagaagctcaggcggaaggagcagctatgggagaagctggccaagcagggcgagctgccccgggaggtgcgcagggcccaggcccggctcctcaacccttctgcaacaagggccaagcccgggccccaggacaccgtagagcggcccttctacgacctctgggcctcagacaaccccctggacaggccgttggttggccaggatgagtttttcctggagcagaccaagaagaaaggagtgaagcggccagcacgcctgcacaccaagccgtcccaggcacccgccgtggaggtggcgcctgccggagcttcctacaatccatcctttgaagaccaccagaccctgctctcagcggcccacgaggtggagttgcagcggcagaaggaggcggagaagctggagcggcagctggccctgcccgccacggagcaggccgccacccaggagtccacattccaggagctgtgcgaggggctgctggaggagtcggatggtgagggggagccaggccagggcgaggggccggaggctggggatgccgaggtctgtcccacgcccgcccgcctggccaccacagagaagaagacggagcagcagcggcggcgggagaaggctgtgcacaggctgcgggtacagcaggccgcgttgcgggccgcccggctccggcaccaggagctgttccggctgcgcgggatcaaggcccaggtggccctgaggctggcggagctggcgcggcggcagaggcggcggcaggcgcggcgggaggctgaggctgacaagccccgaaggctggggcggctcaagtaccaggcacctgacatcgacgtgcagctgagctcggagctgacagactcgctcaggaccctgaagcccgagggcaacatccttcgagaccggttcaagagcttccagaggaggaatatgatcgagcctcgagagagagccaagttcaaacgcaagtacaaggtgaagctggtggagaagcgggcgttccgtgagatccagttgtagctgccatcagatgccggagactcgcccttcaataaaaaatctcttctagctg

SEQ ID NO: 5483 - DNA, 2175 bp, Homo sapiens
cgtctctccgtgaaccccgtgagcggtgtgcagccaccatgttcagctggctgaagcggggcggggcacggggccagcagcccgaggccatccgcacggtgacctcggccctcaaggagctgtaccgcacgaagctgctgccgctggaggagcactaccgctttggggccttccactcgccggccctggaggacgcagacttcgacggcaagcccatggtgctggtggccggccagtacagcacgggcaagaccagcttcatccagtacctgctggagcaggaggtgcccggctcccgcgtggggcctgagcccaccaccgactgctttgtggccgtcatgcacggggacactgagggcaccgtgcccggcaacgccctcgtcgtggacccggacaagcccttccgcaaactcaaccctttcggaaacaccttcctcaacaggttcatgtgtgcccagctccctaatcaggtcctggagagcatcagcatcatcgacaccccgggtatcctgtcgggtgccaagcagagagtgagccgcggctacgacttcccggccgtgctgcgctggttcgcggagcgcgtggacctcatcatcctgctctttgatgcgcacaagctggagatctcggacgagttctcagaggccatcggcgcgttgcggggccatgaggacaagatccgcgtggtgctcaacaaggccgacatggtggagacgcagcagctgatgcgcgtctacggcgcgctcatgtgggcgctgggcaaggtggtgggcacgcccgaggtgctgcgcgtctacatcggctccttctggtcccagcccctcctcgtgcccgacaaccggcgcctcttcgagctggaggagcaggacctcttccgcgacatccagggcctgccccggcacgcagccttgcgcaagctcaacgacctggtgaagagggcccggctggtgcgagttcacgcttacatcatcagctacctgaagaaggagatgccctctgtgtttgggaaggagaacaagaagaagcagctgatcctcaaactgcccgtcatctttgcgaagattcagctggaacatcacatctcccctggggactttcctgattgccagaaaatgcaggagctgctgatggcgcacgacttcaccaagtttcactcgctgaagccgaagctgctagaggcactggacgagatgctgacgcacgacatcgccaagctcatgcccctgctgcggcaggaggagctggagagcaccgaggtgggcgtgcaggggggcgcttttgagggcacccacatgggcccgtttgtggagcggggacctgacgaggccatggaggacggcgaggagggctcggacgacgaggccgagtgggtggtgaccaaggacaagtccaaatacgacgagatcttctacaacctggcgcctgccgacggcaagctgagcggctccaaggccaagacctggatggtggggaccaagctccccaactcagtgctggggcgcatctggaagctcagcgatgtggaccgcgacggcatgctggatgatgaggagttcgcgctggccagccacctcatcgaggccaagctggaaggccacgggctgcccgccaacctgccccgtcgcctggtgccaccctccaagcgacgccacaagggctccgccgagtgagccggcccccctcccatggccctgctgtggctccccagctccagtcggctgcacgcacacccctgctccggctcacacacgccctgcctgccctccctgcccagctgtaaggaccgggggtctccctcctcactaccgccagacaccccggtggaagcatttagaggggaccacgggagggacaaggcttctctgtccgcccttcacacctccagcctcacgttcacttaggcacatcacacacacactggcacacgcaggcatccatccatccgtcattcattcaaatatttattgagcacctactatgtgcccagccctgttctaggcactgggcattaccatagagaacaaaatagacaaatacatctgccctcatggaaggtgacgttcccaggagagggcacctacacagtcacgcaaacacacactaattcctggcagggcccccagcccctcccctggctgagcagccctgtggctgaaatgactagcagataaacag

SEQ ID NO: 5484 - DNA, 5699 bp, Homo sapiens
ctcgtagctccactctgcagcctcaaactcctgggctccagtgatcctctcacctcagcctcccaagtagctaagaccacaggcacatgctgccacccctgactaatttttcttttttaaaatttttttctcactgcgttgcccaggctggtctcaaactctttggctcaagccatccatcctcctacctcagcctcccaaagtgctgagattacaagcgtgaaccaccatgccaggagggaatgttctttcttgaacgtggctgccctgtcacctcagcattctttgcggcagctgtggcctaagcgtagccccttgctaacctcagctctttccttcccacctttcccggcctgcagctccatgtgcaagaagcttccggcaaccacctgaacccagagcccaaccagccggcccccagtgtggacctagacttcctggaagatgacatcctgggctctcctgcgacagggggcggcggcgggggcagtgggggcgctgaccagccctgtgacatcctccagcagagcctccaagaggccaacatcacggagcagacgctggaggccgaggctgagctggacctgggtcccttccagctgcccaccctgcagcctgcggatggcggggcaggcccgacgggcgctggaggggcagcggccgtggctgcggggccccaagccctcttcccaggcagcaccgacctgctggggctgcagggcccgcctaccgtgctgacccaccaggccctggtgccgccccaggacgtggtcaacaaggccctgagtgtgcagcccttcctgcagcctgtgggcctgggcaatgtgacactgcagcccatcccgggcctccaaggcctgcccaatggcagccctgggggtgccacggcggccacactgggcctggcgcccatccaggtggtgggccagcccgtcatggcgctcaacacgcccacctcccagctcctggccaagcaggtgcccgtcagcggctacctggcctcggcggctggcccctcggagcccgtgacgctggcgtcggccggtgtctcgccacagggggctggcctggtcatccagaagaacctctcggccgctgtggccaccacgctcaatgggaactctgtgttcggaggcgcgggggccgcctcggctcccaccgggacgccctcgggacagccgctggcggtggccccaggcctcggctcgtcgccactggtcccggcgcccaacgtgatcctgcatcgcacacccacgcccatccagcccaagcccgcgggggtgctgccgcccaagctctaccagctgacgcccaagccgtttgcgcccgcgggcgccacgctcaccatccagggcgagccgggggcgctcccgcagcagcccaaggccccgcagaacctgacgttcatggcggcggggaaggcgggccagaacgtggtgctgtcgggcttccccgcgcctgcgctgcaagcgaacgtcttcaagcagccaccggccaccaccaccggagcggccccgccgcagccccccggggccctgagcaaacccatgagcgtccacctcctgaaccaaggcagcagcatcgtcatccccgcccagcacatgctgccgggccagaaccagttcctactgcctggcgccccggcggtccagctcccgcagcagctctcagccctgccggccaacgtgggcgggcagatcctggcggccgctgccccccacacaggtggacagctcatcgcgaaccccatcctcacaaaccagaacctggcgggcccactgagcctgggccccgtgttggccccccactccggggcccacagcgcgcacatcctctccgccgctcccatccaggtgggccagcctgcgctcttccagatgcccgtgtcgctggcggcgggcagcctgcccacgcagagccagccagcgcccgccgggccggccgccaccactgtcctccagggggtcaccctgccccccagcgccgtggccatgctcaacacccccgacggcctggtgcagccggccacccctgccgctgccaccggggaggccgcgcctgtcctcacggtgcagcctgccccccaggcgccccccgcggtcagcacacccctgcccctgggcctccagcagccgcaggcgcagcagcccccgcaggcccccaccccacaggccgccgccccgcctcaggccaccaccccccagcccagccctggcctggcgtctagcccggagaagatcgtcctggggcagccgccctctgccacccccacggccatcctcactcaggactccctgcagatgttcctgccccaggagaggagccagcagcccctctccgcagagggcccccacctctccgtgcctgcctcggtcatagtcagcgccccgcctcccgcccaagacccagccccagccacccccgtcgccaaaggagctggcctcggccctcaggcccccgacagccaggcttccccggctccggccccccagatcccggcagcggctccgctgaagggcccaggcccctcttcgtccccgtcactacctcaccaggcccctctgggggacagcccccacctgccctccccacaccccacccggcccccttcccgcccaccctcccggccacagagtgtgtcccgccctccctcagagccacccttgcacccttgccccccaccccaggcccccccaactctgcctggcatctttgtcatccaaaaccagctaggcgttcccccgcctgccagcaacccggcccctactgccccaggcccgccgcagccgcctctccgcccccagtcccagccgcctgagggaccgctgcccccagccccccacctccctccatcctccacctcctctgctgtggcctcctcctctgagacgtcctccaggttgccagcccctacgccatccgacttccagctccagttcccacccagccaggggccccacaagtcccccactccccctccaaccctccacctggtccctgagccggcagcaccccccccaccgcctcctcggaccttccagatggtgaccacccccttcccagcgctgccccagccgaaggctcttctcgagagatttcaccaggtgccgtccggaatcatcctccagaacaaggctgggggggcccctgccgccccgcagacctccaccagcctggggcccctcaccagccccgctgcgtctgtgctggtcagtgggcaggccccatctgggacccccactgcccccagccacgcccccgccccggcacccatggccgccacaggcctccctcctctgcttccagccgagaacaaggcttttgccagcaacctcccgaccctgaatgtggccaaggccgcttcctccgggccagggaagccctccgggctgcagtatgagagcaaactgagtggcctgaagaagccccccacgcttcagcccagcaaggaagcctgtttcctggagcatttgcacaaacaccagggctccgtcctgcaccccgactacaagacggccttcccctcctttgaggacgccctgcatcgcctcctgccctaccatgtctaccagggcgccctcccctcccccagtgactaccacaaagtggacgaggagtttgagacggtctccacgcagctgctgaaacgcacccaggccatgctcaataaatatcggctcctgctcctggaggagtcccggagggtgagcccctcagcggagatggtaatgatcgaccgaatgttcattcaggaggagaagaccacccttgccttggataaacagctggccaaggagaagccggacgagtacgtgtcttcctcccgctcgctcggcctccccatcgcagcctcttccgagggtcatcggcttcccggccacggccccctgtcgtcttcagctcccggggcctccacccagccccctccacacctgcccaccaagcttgtgatccggcacggcggggcaggcggctccccttcggtcacctgggcccgggcgtcctcctccctgtcctcctcttcctcctcctcctctgccgcctcctccttggacgccgacgaggacggccccatgccctcccgcaaccgcccgcccatcaagacctacgaggcccggagccgcatcgggctcaagctcaagatcaagcaggaagccgggctcagcaaggtcgtgcacaacacggccctggaccccgtgcaccagcccccgccaccccccgctaccctcaaggtggccgagcccccgccacggccgccaccaccaccgccgcccacgggccagatgaacggcacggtggaccacccgccgcctgccgcccccgagcgcaagcccctgggcaccgccccgcactgcccgcgcctgccactgcgcaagacctaccgcgagaacgtggggggccctggcgcgccggaggggacgcccgcaggcagggcacggggaggcagcccggcgccgctgcccgccaaagtggacgaggccaccagcgggctcatccgcgagctggcggccgtggaggacgagctgtaccagcgtatgctgaagggccccccgccagagcccgcagccagcgccgcccaaggcaccggggaccccgactgggaggcgcccgggctgccccctgccaagcggcgcaagtccgagtcgcccgacgtggaccaggccagcttctccagcgacagcccgcaggatgacacgctcaccgagcacctgcagagcgccatcgacagcatcctgaacctgcagcaggcccccggccggacgcccgcgccctcgtacccccacgctgcctcggccggcacccccgcatccccgccgcccctgcacaggcccgaggcctacccaccctccagtcacaacggtggcctcggcgccaggacgttgaccagataacaccgggccgcctccccttccccgtcccctcctcccgaagacgccgggacagtcgggtgtccgccctcagcctcctggggactcgagccggggatcccctgacggtttttcttgcctaagttatttgagtcacaaaggcctccttccctgccgcctgcttcagctgggttgctggggggtgggcgtggatttagggagggggctgtgatgtaaaacgtctcccctgccaaaggaggggcaaagtgctgtgtcagttcctgtttcttcccatttcctggcacactctgcccctctgtccgggggacacgcgcatgtgtttgccagggatggggccaccgggttgatgccaacgctccgggtgcctgtcttgtctgtgtggcttctcagatggtggagggtgctgggagctggcagggtccttccagacagtctcagcctctccccgccgcccccaacaggctgtcaaacaaaaccggagagggggtgggggagccagcctcccagcgtgctgtgcccgcaggcacccgtgtgacatccgcacgtccagctccgtgacctgtgtgtgtgtgtgtgtgcacaagtgagtgagagatttcgaacgcccacccctcgactttgaaatctgagcaaaacaagaaactggggtcttcctctcccccgaacctctccccagctagtcttccctctgttcttcctgcctccagccgcccgcgccagattttgaaatctcggagacaaaactagtactgtaagataaatttttttgtactgtatttattgtgtataacgatttttttaaaggagaat

SEQ ID NO: 5485 - DNA, 1250 bp, Homo sapiens
gcggctgagtcttcccagggtcagggtcaggcgctttgctgagtccctttgtggccgccatggacaattccgggaaggaagcggaggcgatggcgctgttggccgaggcggagcgcaaagtgaagaactcgcagtccttcttctctggcctctttggaggctcatccaaaatagaggaagcatgcgaaatctacgccagagcagcaaacatgttcaaaatggccaaaaactggagtgctgctggaaacgcgttctgccaggctgcacagctgcacctgcagctccagagcaagcacgacgcagccacctgctttgtggacgctggcaacgcattcaagaaagccgacccccaagaggccattaactgtttgatgcgagcaatcgagatctacacagacatgggccgattcacgattgcggccaagcaccacatctccattgctgagatctatgagacagagttggtggacatcgagaaggccattgcccactacgagcagtctgcagactactacaaaggcgaggagtccaacagctcagccaacaagtgtctgctgaaggtggctggttacgctgcgctgctggagcagtatcagaaggccattgacatctacgaacaggtggggaccaatgccatggacagccccctcctcaagtacagcgccaaagactacttcttcaaggcggccctctgccacttctgcatcgacatgctcaacgccaagctggctgtccaaaagtatgaggagctgttcccagctttctctgattcccgggaatgcaagttgatgaaaaaattgctagaggcccacgaggagcagaatgtggacagctacaccgagtcggtgaaggaatacgactccatctcccggctggaccagtggctcaccaccatgctgctgcgcatcaagaagaccatccagggcgatgaggaggacctgcgctaagccccacccagccccccagtgcccgtcttcctgtcccatctgctcagagagagccaagctctaaagcacatgtagccgctgagacctgctgtttctgctgggggcaggctcctcttcccccagccccgggagcctcccccagcttcctgcagccccgacctctcaggttagaccctgggccctggagcttaggggattctccccaccccagccccacacctgctccttccctaatgctttgaggttttcttggttggaagctgcagctggcccaagaaagaaaataaaaaacaacacttttgc

SEQ ID NO: 5486 - DNA, 2109 bp, Homo sapiens
ttggcttgagcgggaccggagctgaggcaggaagagccggcgccatggtggagaaggaggaggctggcggcggcattagcgaggaggaggcggcacagtatgaccggcagatccgcctgtggggactggaggcccagaaacggctgcgggcctctcgggtgcttcttgtcggcttgaaaggacttggggctgaaattgccaagaatctcatcttggcaggagtgaaaggactgaccatgctggatcacgaacaggtaactccagaagatcccggagctcagttcttgattcgtactgggtctgttggccgaaatagggctgaagcctctttggagcgagctcagaatctcaaccccatggtggatgtgaaggtggacactgaggatatagagaagaaaccagagtcatttttcactcaattcgatgctgtgtgtctgacttgctgctccagggatgtcatagttaaagttgaccagatctgtcacaaaaatagcatcaagttctttacaggagatgtttttggctaccatggatacacatttgccaatctaggagagcatgagtttgtagaggagaaaactaaagttgccaaagttagccaaggagtagaagatgggcccgacaccaagagagcaaaacttgattcttctgagacaacgatggtcaaaaagaaggtggtcttctgccctgttaaagaagccctggaggtggactggagcagtgagaaagcaaaggctgctctgaagcgcacgacctccgactactttctccttcaagtgctcttaaagttccgtacagataaaggaagagatcccagttctgatacatatgaggaagattctgagttgttgctccagatacgaaatgatgtgcttgactcactgggtattagtcctgacctgcttcctgaggactttgtcaggtactgcttctccgagatggccccagtgtgtgcggtggttggagggattttggcacaggaaattgtgaaggccctgtctcagcgggaccctcctcacaacaacttcttcttcttcgatggcatgaaggggaatgggattgtggagtgccttggccccaagtgaactcaagatttggcagccccagagatgccaactgcagcatgcccacctgtattccctgtccccttccttcatgaaggcatctccaggcaaggaaaactgaagtcattggcccgatacaaaacatttcctgcaacgaaggaggtggtgccgacgtgctgcttcccatcaccagcagctgctcgacaaggggcgcagggtggctgtctttgttccagcactgttcaggctgcctgtcatcccgggcctgccagctcccctgagtgatgagcacttccaagcacccctctgccctttctctgtccttatgctgtcccggcctcgccagccctctggggcattgtgggagatgcctgccaggaatgagcaagctctgttgctcgggagcctcttgtcaccttcttggacttattccccacctgataccttatagagaaaagtgtgaattcaggtggagagtaggcccaggccccatgaggcaccagtggaagcacagctccaagttcagacaggtgcccttagagaggaaaaccatgacaggcaaatgcatttcctctggagtttgagaccctgacaaacaacaggtggcatctggtgtgctgttcttgagttttcgtttaggattagttgagttccagctgggttttgggagaaaggagatgctaccaagtcttggatgttagggcgagaccctgcaagttgagtattagagagcttgtctttcaaggcaggttcctggggcttcagggctaggagggaggagcctgcccttttaacagaaccccagtcacatgcggctcaagtcactcagaggctgttgcatttcagggctatgttggtcctttgtttacctcctaaaccacagctgtttgtgtttcacatatgttgtgaattttccttggttctttttaaaggaatgataataaagttacttgctttaggatttgcttgtttttcttccacttcagaagcttctgagagggaatgggatgatcctaccagttgccttttcagacctgaggctcta

SEQ ID NO: 5487 - DNA, 663 bp, Homo sapiens
gtcattggcccgatacaaaacatttcctgcaacgaaggaggtggtgccgacgtgctgcttcccatcaccagcagctgctcgacaaggggcgcagggtggctgtctttgttccagcactgttcaggctgcctgtcatcccgggcctgccagctcccctgagtgatgagcacttccaagcacccctctgccctttctctgtccttatgctgtcccggcctcgccagccctctggggcattgtgggagatgcctgccaggaatgagcaagctctgttgctcgggagcctcttgtcaccttcttggacttattccccacctgataccttatagagaaaagtgtgaattcaggtggagagtaggcccaggccccatgaggcaccagtggaagcacagctccaagttcagacaggtgcccttagagaggcaggtggcatctggtgtgctgttcttgagttttcgtttaggattagttgagttccagctgggttttgggagaaaggagatgctaccaagtcttggatgttagggcgagaccctgcaagttgagtattagagagcttgtctttcaaggcaggttcctggggcttcagggctaggagggaggagcctgcccttttaacagaaccccagtcacatgcggctcaagtcactcagaggctgttgc

SEQ ID NO: 5488 - DNA, 777 bp, Homo sapiens
tgcaccctgagccggagctgcccagtcgccgcgggaccggggccgctggggtctggacgggggtcgccatgatccgctttatcctcatccagaaccgggcaggcaagacgcgcctggccaagtggtacatgcagtttgatgatgatgagaaacagaagctgatcgaggaggtgcatgccgtggtcaccgtccgagacgccaaacacaccaactttgtggagttccggaactttaagatcatttaccgccgctatgctggcctctacttctgcatctgtgtggatgtcaatgacaacaacctggcttacctggaggccattcacaacttcgtggaggtcttaaacgaatatttccacaatgtctgtgaactggacctggtgttcaacttctacaaggtttacacggtcgtggacgagatgttcctggctggcgaaatccgagagaccagccagacgaaggtgctgaaacagctgctgatgctacagtccctggagtgagggcaggcgagccccaccccggccccggcccctcctggactcgcctgctcgcttccccttcccaggcccgtggccaacccagcagtccttccctcagctgcctaggaggaagggacccagctgggtctgggccacaagggaggagactgcaccccactgcctctgggccctggctgtgggcagaggccaccgtgtgtgtcccgagtaaccgtgccgttgtcgtgtgatgccataagcgtctgtgcgtggagtccccaataaacctgtggtcctgcctggc

SEQ ID NO: 5489 - DNA, 2870 bp, Homo sapiens
ggcacgcccgggaggctttctctggctggtaaccgctactcccggacaccagaccaccgccttccgtacacaggggcccgcatcccaccctcccggacctaagagcctgggtcccctgtttccggaggtccgcttcccggcccccagattctggcatcccagccctcagtgtccaagacccaggcagcccgggtccccgcctcccggatccaggcgtccgggatctgcgccaccagaacctagcctcctgcagacctccgccatctgggggcactcaacctcctggagccaagggccccacgtcccacccagagaaactctcgtattcccagctcctagggccaaggaacccgggcgctccgaactcccagctttcggacatctggcacacggggcagagcagagaagcctcagcgcccagcctggggaatttaaacactccagcttccaagagccaaggaacttcagtgctgtgaactcacaactctaaggagccctccaaagttccagtctccaggtgctgttactcaactcagtcctaggaacgtcgggtcctgggaaggagcccaagcgctcccagccagcttccaggcgctaagaaaccccggtgcttcccatcatggtggccgatcctcctcgagactccaaggggctcgcagcggcggagcccaccgccaacgggggcctggcgctggcctccatcgaggaccaaggcgcggcagcaggcggctactgcggttcccgggaccaggtgcgccgctgccttcgagccaacctgcttgtgctgctgacagtggtggccgtggtggccggcgtggcgctgggactgggggtgtcgggggccgggggtgcgctggcgttgggcccggagcgcttgagcgccttcgtcttcccgggcgagctgctgctgcgtctgctgcggatgatcatcttgccgctggtggtgtgcagcttgatcggcggcgccgccagcctggaccccggcgcgctcggccgtctgggcgcctgggcgctgctctttttcctggtcaccacgctgctggcgtcggcgctcggagtgggcttggcgctggctctgcagccgggcgccgcctccgccgccatcaacgcctccgtgggagccgcgggcagtgccgaaaatgcccccagcaaggaggtgctcgattcgttcctggatcttgcgagaaatatcttcccttccaacctggtgtcagcagcctttcgctcatactctaccacctatgaagagaggaatatcaccggaaccagggtgaaggtgcccgtggggcaggaggtggaggggatgaacatcctgggcttggtagtgtttgccatcgtctttggtgtggcgctgcggaagctggggcctgaaggggagctgcttatccgcttcttcaactccttcaatgaggccaccatggttctggtctcctggatcatgtggtacgcccctgtgggcatcatgttcctggtggctggcaagatcgtggagatggaggatgtgggtttactctttgcccgccttggcaagtacattctgtgctgcctgctgggtcacgccatccatgggctcctggtactgcccctcatctacttcctcttcacccgcaaaaacccctaccgcttcctgtggggcatcgtgacgccgctggccactgcctttgggacctcttccagttccgccacgctgccgctgatgatgaagtgcgtggaggagaataatggcgtggccaagcacatcagccgtttcatcctgcccatcggcgccaccgtcaacatggacggtgccgcgctcttccagtgcgtggccgcagtgttcattgcacagctcagccagcagtccttggacttcgtaaagatcatcaccatcctggtcacggccacagcgtccagcgtgggggcagcgggcatccctgctggaggtgtcctcactctggccatcatcctcgaagcagtcaacctcccggtcgaccatatctccttgatcctggctgtggactggctagtcgaccggtcctgtaccgtcctcaatgtagaaggtgacgctctgggggcaggactcctccaaaattacgtggaccgtacggagtcgagaagcacagagcctgagttgatacaagtgaagagtgagctgcccctggatccgctgccagtccccactgaggaaggaaaccccctcctcaaacactatcgggggcccgcaggggatgccacggtcgcctctgagaaggaatcagtcatgtaaaccccgggagggaccttccctgccctgctgggggtgctctttggacactggattatgaggaatggataaatggatgagctagggctctgggggtctgcctgcacactctggggagccaggggccccagcaccctccaggacaggagatctgggatgcctggctgctggagtacatgtgttcacaagggttactcctcaaaacccccagttctcactcatgtccccaactcaaggctagaaaacagcaagatggagaaataatgttctgctgcgtccccaccgtgacctgcctggcctcccctgtctcagggagcaggtcacaggtcaccatggggaattctagcccccactggggggatgttacaacaccatgctggttattttggcggctgtagttgtggggggatgtgtgtgtgcacgtgtgtgtgtgtgtgtgtgtgtgtgtgtgtgtgtgtgttctgtgacctcctgtccccatggtacgtcccaccctgtccccagatcccctattccctccacaataacagaaacactcccagggactctggggagaggctgaggacaaatacctgctgtcactccagaggacattttttttagcaataaaattgagtgtcaactattt

SEQ ID NO: 5490 - protein, 541 aa, Homo sapiens
MVADPPRDSKGLAAAEPTANGGLALASIEDQGAAAGGYCGSRDQVRRCLRANLLVLLTVVAVVAGVALGLGVSGAGGALALGPERLSAFVFPGELLLRLLRMIILPLVVCSLIGGAASLDPGALGRLGAWALLFFLVTTLLASALGVGLALALQPGAASAAINASVGAAGSAENAPSKEVLDSFLDLARNIFPSNLVSAAFRSYSTTYEERNITGTRVKVPVGQEVEGMNILGLVVFAIVFGVALRKLGPEGELLIRFFNSFNEATMVLVSWIMWYAPVGIMFLVAGKIVEMEDVGLLFARLGKYILCCLLGHAIHGLLVLPLIYFLFTRKNPYRFLWGIVTPLATAFGTSSSSATLPLMMKCVEENNGVAKHISRFILPIGATVNMDGAALFQCVAAVFIAQLSQQSLDFVKIITILVTATASSVGAAGIPAGGVLTLAIILEAVNLPVDHISLILAVDWLVDRSCTVLNVEGDALGAGLLQNYVDRTESRSTEPELIQVKSELPLDPLPVPTEEGNPLLKHYRGPAGDATVASEKESVM

SEQ ID NO: 5491 - DNA, 2842 bp, Homo sapiens
gtaaccgctactcccggacaccagaccaccgccttccgtacacaggggcccgcatcccaccctcccggacctaagagcctgggtcccctgtttccggaggtccgcttcccggcccccagattctggcatcccagccctcagtgtccaagacccaggcagcccgggtccccgcctcccggatccaggcgtccgggatctgcgccaccagaacctagcctcctgcagacctccgccatctgggggcactcaacctcctggagccaagggccccacgtcccacccagagaaactctcgtattcccagctcctagggccaaggaacccgggcgctccgaactcccagctttcggacatctggcacacggggcagagcagagaagcctcagcgcccagcctggggaatttaaacactccagcttccaagagccaaggaacttcagtgctgtgaactcacaactctaaggagccctccaaagttccagtctccaggtgctgttactcaactcagtcctaggaacgtcgggtcctgggaaggagcccaagcgctcccagccagcttccaggcgctaagaaaccccggtgcttcccatcatggtggccgatcctcctcgagactccaaggggctcgcagcggcggagcccaccgccaacgggggcctggcgctggcctccatcgaggaccaaggcgcggcagcaggcggctactgcggttcccgggaccaggtgcgccgctgccttcgagccaacctgcttgtgctgctgacagtggtggccgtggtggccggcgtggcgctgggactgggggtgtcgggggccgggggtgcgctggcgttgggcccggagcgcttgagcgccttcgtcttcccgggcgagctgctgctgcgtctgctgcggatgatcatcttgccgctggtggtgtgcagcttgatcggcggcgccgccagcctggaccccggcgcgctcggccgtctgggcgcctgggcgctgctctttttcctggtcaccacgctgctggcgtcggcgctcggagtgggcttggcgctggctctgcagccgggcgccgcctccgccgccatcaacgcctccgtgggagccgcgggcagtgccgaaaatgcccccagcaaggaggtgctcgattcgttcctggatcttgcgagaaatatcttcccttccaacctggtgtcagcagcctttcgctcatactctaccacctatgaagagaggaatatcaccggaaccagggtgaaggtgcccgtggggcaggaggtggaggggatgaacatcctgggcttggtagtgtttgccatcgtctttggtgtggcgctgcggaagctggggcctgaaggggagctgcttatccgcttcttcaactccttcaatgaggccaccatggttctggtctcctggatcatgtggtacgcccctgtgggcatcatgttcctggtggctggcaagatcgtggagatggaggatgtgggtttactctttgcccgccttggcaagtacattctgtgctgcctgctgggtcacgccatccatgggctcctggtactgcccctcatctacttcctcttcacccgcaaaaacccctaccgcttcctgtggggcatcgtgacgccgctggccactgcctttgggacctcttccagttccgccacgctgccgctgatgatgaagtgcgtggaggagaataatggcgtggccaagcacatcagccgtttcatcctgcccatcggcgccaccgtcaacatggacggtgccgcgctcttccagtgcgtggccgcagtgttcattgcacagctcagccagcagtccttggacttcgtaaagatcatcaccatcctggtcacggccacagcgtccagcgtgggggcagcgggcatccctgctggaggtgtcctcactctggccatcatcctcgaagcagtcaacctcccggtcgaccatatctccttgatcctggctgtggactggctagtcgaccggtcctgtaccgtcctcaatgtagaaggtgacgctctgggggcaggactcctccaaaattacgtggaccgtacggagtcgagaagcacagagcctgagttgatacaagtgaagagtgagctgcccctggatccgctgccagtccccactgaggaaggaaaccccctcctcaaacactatcgggggcccgcaggggatgccacggtcgcctctgagaaggaatcagtcatgtaaaccccgggagggaccttccctgccctgctgggggtgctctttggacactggattatgaggaatggataaatggatgagctagggctctgggggtctgcctgcacactctggggagccaggggccccagcaccctccaggacaggagatctgggatgcctggctgctggagtacatgtgttcacaagggttactcctcaaaacccccagttctcactcatgtccccaactcaaggctagaaaacagcaagatggagaaataatgttctgctgcgtccccaccgtgacctgcctggcctcccctgtctcagggagcaggtcacaggtcaccatggggaattctagcccccactggggggatgttacaacaccatgctggttattttggcggctgtagttgtggggggatgtgtgtgtgcacgtgtgtgtgtgtgtgtgtgtgtgtgtgtgtgtgtgtgttctgtgacctcctgtccccatggtacgtcccaccctgtccccagatcccctattccctccacaataacagaaacactcccagggactctggggagaggctgaggacaaatacctgctgtcactccagaggacattttttttagcaataaaattgagtgtcaactattt

SEQ ID NO: 5492 - DNA, 3188 bp, Homo sapiens
atgatggaggagcgagcggccgccgcggtcgccgccgccgcctcctcctgccgtccgctcggctcaggcgcgggccctggccccactggggcggccccggtctccgcccctgcccccgggccgggcccggcaggtaagggaggcggcggcggaggcagccccgggcccacggcgggcccggagcccctgagcctgccggggatcctgcactttatccagcacgagtgggcgcgcttcgaagccgagaaagcccgctgggaggccgagcgcgccgagttacaggctcaggtggccttccttcagggagagaggaaagggcaggagaatctaaagacggacctggtgcggcggatcaagatgctagagtatgcgctgaagcaggaaagggccaaatatcataaactgaagtttgggacagacctgaaccagggggagaagaaagcagatgtgtcagaacaagtctccaatggccccgtggaatcggtcaccctggagaacagcccgttggtgtggaaggaggggcggcagcttctccgacagtacctggaagaggtgggctacacagacaccatcctcgacatgcggtccaagcgcgtccgttccctgctgggccgctcgctggagctcaacggggcagtggagccgagtgaaggggcccccagggctccaccaggccctgcagggctcagtggtggggagtcgctgctggtgaaacagatcgaggagcagataaagaggaacgcggcaggcaaagatggcaaagagcgcttgggcggctcagtgctggggcagatccccttcctgcagaactgcgaggacgaagacagcgacgaggacgatgagctggacagcgtgcagcacaagaagcagcgtgtgaagctcccatccaaggctctggtgcccgaaatggaagacgaggatgaggaagacgactctgaggatgctatcaatgagtttgatttcctgggctcaggagaggatggggaaggggctccagaccctcggcggtgcactgtggatgggagcccccatgagctggaaagccgtcgggtcaaactccaaggcgttctggctgacctgcgggatgtggatgggctgcccccaaaagtgactggcccgcctcctggcacaccccagccccggccacatgaagacgtcttcatcatggacactatcgggggcggggaggtgagcctgggggacttggcagatctcaccgtcaccaacgacaacgacctcagctgcgatctgtctgacagcaaagatgcttttaagaagacgtggaaccccaagttcaccctgcgctcgcactacgacggcattcgttccctggccttccaccacagccagtcggctctgctcaccgcctccgaggacggcacgctcaagctctggaacctgcagaaggcggtcacggccaagaagaatgcggcgctagatgtggaacctatacatgctttccgggctcacaggggcccagtgttggctgtggctatgggcagcaacagtgaatactgctacagtggcggggcagatgcctgcatccatagttggaagattccagacctcagcatggatccctatgatggctacgacccaagcgtgctgagccacgtcctggagggccacggggacgccgtgtggggcctggccttcagtcccacctcccagcgcctggcctcctgttctgctgatggcaccgtccgcatctgggaccccagcagcagcagcccggcctgcctctgcaccttccccacagccagcgagcacggggtccccacctcagtggccttcaccagcaccgagcctgcccacatcgtggcctccttccgctctggcgacaccgtcttgtatgacatggaggttggcagtgccctcctcacgctggagtcccggggcagcagcggtccaacccagatcaaccaagtggtgagtcatccaaaccagcctctcaccatcaccgcccacgacgacaggggcatccgcttcctggacaatcggacaggtaagccggtgcactccatggttgcacacctggacgcagtcacctgcctagccgtggaccccaacggcgcattcctgatgtcaggaagccatgactgctccctgcgtctctggagcctggacaacaaaacgtgcgtgcaggagatcacggcccaccgcaagaagcacgaggaggccatccacgctgttgcctgccaccccagcaaggccctcattgccagtgctggcgctgatgccctggccaaggtcttcgtatgatgcccacctggccctgccctggccgccacgctggctggggtgtagggccgggcaggtggggctgaggggactcccagcctcgctggaggtgcagaggcctggcctctgtctgtttgccatggagcctggtggtgctaacggccctttccccaggaatccctccccaacggctgccttccccaagcatccagcctggggatgggcccctttcaggaatcacccccgaggatggcctcggggtttccccctgtgccctgacagccgctcctggtatcagagctgctttccagagggcagcacagccagggccgggtgtctttagggatcagtttttccaagactccagaaggtgccaggttctccccttgagctcctgctcccccatcccccatcctcccagacctgggcaggagctgtgctgggagaaagggtggcagccgggagcctcagagctgagccccggcctggctgcccctcccctccggccctctccactgctttccagacactaaccaaggcttccaggccagggattgcccaacactcctagggcagccctcccagcgccccatggggtcgcccatgggtagagacggctttcttgtgcccctccctggggcatggagggtggagtgggcctcgggtccccctgaactccctgtatatctgtataaataacgggattttcatggcgccgccccacccgcattatcactgtgtgatggtctcagtcagtctcctccctgtctccactctttccctctatttatttcactctcttgtttggttctaccctgcaccctcggtccccttccaggttcctgtttataagccccaacccctctgtccccatcttgtatgtgaaaacttgtctcaataaaccctttggagtaaaaaaaaaaaaaaaaaaaaaaaaaaaaaaaaaa

SEQ ID NO: 5493 - protein, 753 aa, Homo sapiens
MMEERAAAAVAAAASSCRPLGSGAGPGPTGAAPVSAPAPGPGPAGKGGGGGGSPGPTAGPEPLSLPGILHFIQHEWARFEAEKARWEAERAELQAQVAFLQGERKGQENLKTDLVRRIKMLEYALKQERAKYHKLKFGTDLNQGEKKADVSEQVSNGPVESVTLENSPLVWKEGRQLLRQYLEEVGYTDTILDMRSKRVRSLLGRSLELNGAVEPSEGAPRAPPGPAGLSGGESLLVKQIEEQIKRNAAGKDGKERLGGSVLGQIPFLQNCEDEDSDEDDELDSVQHKKQRVKLPSKALVPEMEDEDEEDDSEDAINEFDFLGSGEDGEGAPDPRRCTVDGSPHELESRRVKLQGVLADLRDVDGLPPKVTGPPPGTPQPRPHEDVFIMDTIGGGEVSLGDLADLTVTNDNDLSCDLSDSKDAFKKTWNPKFTLRSHYDGIRSLAFHHSQSALLTASEDGTLKLWNLQKAVTAKKNAALDVEPIHAFRAHRGPVLAVAMGSNSEYCYSGGADACIHSWKIPDLSMDPYDGYDPSVLSHVLEGHGDAVWGLAFSPTSQRLASCSADGTVRIWDPSSSSPACLCTFPTASEHGVPTSVAFTSTEPAHIVASFRSGDTVLYDMEVGSALLTLESRGSSGPTQINQVVSHPNQPLTITAHDDRGIRFLDNRTGKPVHSMVAHLDAVTCLAVDPNGAFLMSGSHDCSLRLWSLDNKTCVQEITAHRKKHEEAIHAVACHPSKALIASAGADALAKVFV

SEQ ID NO: 5494 - DNA, 1128 bp, Homo sapiens
agtccgagtggagagagcgagctgagtggttgtgtggtcgcgtctcggaaaccggtagcgcttgcagcatggctgaccaactgactgaagagcagattgcagaattcaaagaagctttttcactatttgacaaagatggtgatggaactataacaacaaaggaattgggaactgtaatgagatctcttgggcagaatcccacagaagcagagttacaggacatgattaatgaagtagatgctgatggtaatggcacaattgacttccctgaatttctgacaatgatggcaagaaaaatgaaagacacagacagtgaagaagaaattagagaagcattccgtgtgtttgataaggatggcaatggctatattagtgctgcagaacttcgccatgtgatgacaaaccttggagagaagttaacagatgaagaagttgatgaaatgatcagggaagcagatattgatggtgatggtcaagtaaactatgaagagtttgtacaaatgatgacagcaaagtgaagaccttgtacagaatgtgttaaatttcttgtacaaaattgtttatttgccttttctttgtttgtaacttatctgtaaaaggtttctccctactgtcaaaaaaatatgcatgtatagtaattaggacttcattcctccatgttttcttcccttatcttactgtcattgtcctaaaaccttattttagaaaattgatcaagtaacatgttgcatgtggcttactctggatatatctaagcccttctgcacatctaaacttagatggagttggtcaaatgagggaacatctgggttatgccttttttaaagtagttttctttaggaactgtcagcatgttgttgttgaagtgtggagttgtaactctgcgtggactatggacagtcaacaatatgtacttaaaagttgcactattgcaaaacgggtgtattatccaggtactcgtacactatttttttgtactgctggtcctgtaccagaaacattttcttttattgttacttgctttttaaactttgtttagccacttaaaatctgcttatggcacaatttgcctcaaaatccattccaagttgtatatttgttttccaataaaaaaattacaatttaccc

SEQ ID NO: 5495 - protein, 149 aa, Homo sapiens [sequence omitted]

SEQ ID NO: 5496 - DNA, 2713 bp, Homo sapiens
gagcctaccaaacctttggttcgcagggctggagctaagtctcgctccaggagaaagaagcagaagaagaactccaggcaggaagcagtgccctggaaaaaacccaaaggcatcaattccaacagcacagctaacttggaggatcctgaggtgggtgatgctgaaagcatggcgatctcagagccgatcaagggcagcagaaagccctgtgtgaataaggaggagttggctttgaagaagcccatggcgaaatgtgcctggaagggtcccagagagccacctcaggatgcccgggcagaagccgagagcccaggaggcgcctctgagtcagaccaagatggtggccatgaaagcccaccaaagaagaaggccgtggcctgggtgtctgccaagaaccccgctcccatgaggaagaagaagaaggtgagcttgggccctgtctcctacgtcttggttgactcagaagatggcaggaagaagccggtgatgccaaagaaagggccaggctcaagaagggaggcatcagatcagaaggcccctcggggccagcagcctgccgaggcaacagcctcaacctctaggggtccgaaggccaagccagaaggctctcctcggcgtgccaccaatgaatccagaaaggtttgatctgggggaccacccatactgaggagttgaaagaacaaggaagaagtaccaagtcaaccaagttctctcttgtcactgaataagactttggactctcttagggcccctgttgatagagatctggccctgaggtaaacgataggtgaggtcttgggtgggagggagttggggaagggaggtggatctctatgcccttttctctaccaggcctgccgtttcaccgccttctctactcaccttctcttcggaggcaggagagttggtaagaggattgggaaaattctagaacattcattcccctttatgcatgagcagggtcactgttacactcatccatgttcagcttttctcccccacgccttgctccctcctcggaatggtcagcgacctctgcaggccctggcatttggaagagctgggtggccctgccatattcttcctcccgccttcctctcgtgtaaccagcggggtaagttaagccaggaccttcgctgcaaacctggttttattgctccttcagtctccagcttccatcctccagttatctagccaggaggtcccaagagttagttttagggaaaaagaatgtctgcctagacctcaaagtctttgagttttagagtctgttagtaaaaatggcactttgattcccatttgggatgagccctctcaggaatcctgtggggaaggggggtgattatagggaaggacgcaggcattcctaggtccccagctctaattccatccatctacccaactgtcaccatctttgcaccaaactgtcaccatctttgcagcagaaggtcactactcacattatagtaagaggggaaaaaaatcttttaaaacttggctgttggccgggcacggtggctcacgcctgtaatcccagcactttgggaggctgaggcaggtcgatcacgaggtcaggcgtttaagaccagcttgaccaacatggtgaaaccccatctctacaaaaattagctgggcgtggtggcgcgcgcctgtaatcccagctactcaggaggctgaggcagatgaattgcttgaatccaggaggcagaggttgcaatgagccgagattgtgccacggcactccagcctgggcagcagagtgagactctctctcaaaaaaacaaaacttggctgttaatgtctgccctctgaattcagacacactatattagaccagaccaccatgtgtcattgtgtgtgtgtgtgtgtgtgtttgcgtgcgcatgtgtagaggagagagcagggtccctgagataatggtttccaaactgtatcgtagccgtccacaaagatgtaatccaaatctatttttctcacgtgtttaaaaaactgaaaagtgactactcagatatgttggaagtcacatcgaagactatcagaatattaccttgtgttcataggttaacttgtttttgtacacgtcttagttatttcaggcatctctttgcttaaaattgagtttcttgtaaatgtgactgatgagcgaggttagaagtggaagaaattcctgtgcatgttctataatctgacaccctgaaagcaagtttcctttcgtcattcacatgctcttgttctgccgtgactgttcaggtgtatggtagtaagtaaatgtattaacatggtgaacagtagtaatattctatcatagagtattagcccttgcaagttttcagggcgtcttttccgacttcagtttttgtgataaagaatgtgaacagttgttagatgttctcagtgattcaactttaaaacaaatttctcgtgatgattcatttcaaaatcctgagtgagtctgactgaaaaatacgagagaaaagagagtggtttccgtttgcagctacacagctgtgtgcatcgacgttctcctggggtgtgtgccaagcgaaacccaggggtgaattggattcttgaagagaccaaagcctgtaactgtccagcttctaatttcaaaacgggtccattagggcttcgttgtgttaacaagttgacaccatgactagtaaatgtaaacgtgtatgtataaaataaagtttagcaaattaagtgtcctgtt

SEQ ID NO: 5497 - DNA, 2075 bp, Mus musculus
cgcgacggttcggccgggtgccgctggcggccgttgccagggtaggggtcgctttgcggcatggcgatggcggagggcgagaggactgagtgtgctgagcccccccgggacgaacccccggctgatggagctctgaagcgggcagaggagctcaagactcaggccaatgactacttcaaagccaaggactacgagaacgccatcaagttctacagccaggccatcgagctgaaccccagcaatgccatctactatggcaaccgcagcctggcctacctgcgcactgagtgctatggctacgcgctgggagacgccacgcgggccattgagctggacaagaagtacatcaagggttattaccgccgggctgccagcaacatggcactgggcaagttccgggccgcgctgcgagactacgagacggtggtcaaggtgaagccccatgacaaggatgccaaaatgaaataccaggagtgcaacaagatcgtgaagcagaaggcctttgagcgggccatcgcgggcgacgagcacaagcgctccgtggtggactcgctggacatcgagagcatgaccattgaggatgagtacagcggacccaagcttgaagacggcaaagtgacaatcagtttcatgaaggagctcatgcagtggtacaaggaccagaagaaactgcaccggaaatgtgcctaccagattctggtacaggtcaaagaggtcctctccaagctgagcacgctcgtggaaaccacactcaaagagacagagaagattacagtatgtggggacacccatggccagttctatgacctcctcaacatattcgagctcaacggtttaccctcggagaccaacccctatatatttaatggtgactttgtggaccgaggctccttctctgtagaagtgatcctcacccttttcggcttcaagctcctgtacccagatcactttcacctccttcgaggcaaccacgagacagacaacatgaaccagatctacggtttcgagggtgaggtgaaggccaagtacacagcccagatgtacgagctctttagcgaggtgttcgagtggctcccgttggcccagtgcatcaacggcaaagtgctgatcatgcacggaggcctgttcagtgaagacggtgtcaccctggatgacatccggaaaattgagcggaatcgacaacccccagattcagggcccatgtgtgacctgctctggtcagatccacagccacagaacgggcgctcgatcagcaagcggggcgtgagctgtcagtttgggcctgacgtcaccaaggccttcttggaagagaacaacctggactatatcatccgcagccacgaagtcaaggccgagggctacgaggtggctcacggaggccgctgtgtcaccgtcttctctgcccccaactactgcgaccagatggggaacaaagcctcctacatccacctccagggctctgacctacggcctcagttccaccagttcacagcagtgcctcatcccaacgtcaagcccatggcctatgccaacacgctgctgcagctaggaatgatgtgaggtgacgggcggggcggcctgcatcccagggcccctccaatcccaccggacccaggccctgggctaggggcagagcaggccccgccccagggcaatgttggacccccttttactttgtaaagtttgtatttattcccctttaggtttgcagagggggtaggggcagagtcaggggctggccagagggtctgctccctggacagagaggaaggaggtggagcagctggggctgggggcacagcctgggcattctgtggggaggccgtcctcggggtggggtggggccgagtggctgccctgcccccctcatttgcatggctcctcccccactcaagcaatagggccccgccataggaagacccccagagagagggtcagcaggggggccccgcctgcgcctcccctcctatagccccatggtggggctaggctggggctcacccccctccccagctattttatgtctgtaattaaatatgttaaaataaagtcattatcggaaaaaaaaaaaaaaa

SEQ ID NO: 5498 - protein, 499 aa, Mus musculus
MAMAEGERTECAEPPRDEPPADGALKRAEELKTQANDYFKAKDYENAIKFYSQAIELNPSNAIYYGNRSLAYLRTECYGYALGDATRAIELDKKYIKGYYRRAASNMALGKFRAALRDYETVVKVKPHDKDAKMKYQECNKIVKQKAFERAIAGDEHKRSVVDSLDIESMTIEDEYSGPKLEDGKVTISFMKELMQWYKDQKKLHRKCAYQILVQVKEVLSKLSTLVETTLKETEKITVCGDTHGQFYDLLNIFELNGLPSETNPYIFNGDFVDRGSFSVEVILTLFGFKLLYPDHFHLLRGNHETDNMNQIYGFEGEVKAKYTAQMYELFSEVFEWLPLAQCINGKVLIMHGGLFSEDGVTLDDIRKIERNRQPPDSGPMCDLLWSDPQPQNGRSISKRGVSCQFGPDVTKAFLEENNLDYIIRSHEVKAEGYEVAHGGRCVTVFSAPNYCDQMGNKASYIHLQGSDLRPQFHQFTAVPHPNVKPMAYANTLLQLGMM

SEQ ID NO: 5499 - DNA, 2207 bp, Homo sapiens
ccccttcctgtggggttcattggggcatcccctttctgctgcaggaacctctcatcagaccgcctgagggaagcggcgcccggagacccgccccggcccggtccacattctccccaggaagccggactctatggggcgggaccctgggggagcctgagccgagcccggagccagccccgaacccctgaacctccagccaggggcgccccgggagcagccagcccgtgggcgagccgcccgcccgccgagcagccatgagcgagacggtcatctgttccagccgggccactgtgatgctttatgatgatggcaacaagcgatggctccctgctggcacgggtccccaggccttcagccgcgtccagatctaccacaaccccacggccaattcctttcgcgtcgtgggccggaagatgcagcccgaccagcaggtggtcatcaactgtgccatcgtccggggtgtcaagtataaccaggccacccccaacttccatcagtggcgcgacgctcgccaggtctggggcctcaacttcggcagcaaggaggatgcggcccagtttgccgccggcatggccagtgccctagaggcgttggaaggaggtgggccccctccacccccagcacttcccacctggtcggtcccgaacggcccctccccggaggaggtggagcagcagaaaaggcagcagcccggcccgtcggagcacatagagcgccgggtctccaatgcaggaggcccacctgctccccccgctgggggtccacccccaccaccaggacctccccctcctccaggtccccccccacccccaggtttgcccccttcgggggtcccagctgcagcgcacggagcagggggaggaccaccccctgcaccccctctcccggcagcacagggccctggtggtgggggagctggggccccaggcctggccgcagctattgctggagccaaactcaggaaagtcagcaagcaggaggaggcctcaggggggcccacagcccccaaagctgagagtggtcgaagcggaggtgggggactcatggaagagatgaacgccatgctggcccggagaaggaaagccacgcaagttggggagaaaacccccaaggatgaatctgccaatcaggaggagccagaggccagagtcccggcccagagtgaatctgtgcggagaccctgggagaagaacagcacaaccttgccaaggatgaagtcgtcttcttcggtgaccacttccgagacccaaccctgcacgcccagctccagtgattactcggacctacagagggtgaaacaggagcttctggaagaggtgaagaaggaattgcagaaagtgaaagaggaaatcattgaagccttcgtccaggagctgaggaagcggggttctccctgaccacagggacccagaagacccgcttctcctttccgcacacccggcctgtcaccctgctttccctgcctctacttgacttggaattggctgaagacacaggaatgcatcgttcccactccccatcccacttggaaaactccaagggggtgtggcttccctgctcacacccacactggctgctgattggctggggaggcccccgcccttttctccctttggtccttcccctctgccatccccttggggccggtccctctgctggggatgcaccaatgaaccccacaggaagggggaaggaaggagggaatttcacattcccttgttctagattcactttaacgcttaatgccttcaaagttttggtttttttaagaaaaaaaaatatatatatatttgggttttgggggaaaagggaaatttttttttctctttggttttgataaaatgggatgtgggagtttttaaatgctatagccctgggcttgccccatttggggcagctatttaaggggaggggatgtctcaccgggctgggggtgagatatccccccaccccagggactccccttccctctggctccttccccttttctatgaggaaataagatgctgtaactttttggaacctcagttttttgattttttatttgggtaggttttggggtccaggccattttttttaccccttggaggaaataagatgagggagaaaggagaaggggaggaaacttctcccctcccaccttcacctttagcttcttgaaaatgggcccctgcagaataaatctgccagtttttataaaaaaaaaa

SEQ ID NO: 5500 - protein, 380 aa, Homo sapiens
MSETVICSSRATVMLYDDGNKRWLPAGTGPQAFSRVQIYHNPTANSFRVVGRKMQPDQQVVINCAIVRGVKYNQATPNFHQWRDARQVWGLNFGSKEDAAQFAAGMASALEALEGGGPPPPPALPTWSVPNGPSPEEVEQQKRQQPGPSEHIERRVSNAGGPPAPPAGGPPPPPGPPPPPGPPPPPGLPPSGVPAAAHGAGGGPPPAPPLPAAQGPGGGGAGAPGLAAAIAGAKLRKVSKQEEASGGPTAPKAESGRSGGGGLMEEMNAMLARRRKATQVGEKTPKDESANQEEPEARVPAQSESVRRPWEKNSTTLPRMKSSSSVTTSETQPCTPSSSDYSDLQRVKQELLEEVKKELQKVKEEIIEAFVQELRKRGSP

SEQ ID NO: 5501 - DNA, 620 bp, Homo sapiens
acagtagtaagagtaacactgtagccgccaccggcaaggggtgcgcgctggggagcggacgctgcatcccctttctgctgcaggaacctctcatcagaccgcctgagggaagcggcgcccggagacccgccccggcccggtccacattctccctgaccacagggacccagaagacccgcttctcctttccgcacacccggcctgtcaccctgctttccctgcctctacttgacttggaattggctgaagactacacaggaatgcatcgttcccactccccatcccacttggaaaactccaagggggtgtggcttccctgctcacacccacactggctgctgattggctggggaggcccccgcccttttctccctttggtccttcccctctgccatccccttggggccggtccctctgctggggatgcaccaatgaaccccacaggaagggggaaggaaggagggaatttcacattcccttgttctagattcactttaacgcttaatgccttcaaagttttggtttttttaagaaaaaaaaatatatatatatttgggttttgggggaaaagggaaatttttttttctctttggttttgataaaatgggatgtgggagttt

SEQ ID NO: 5502 - DNA, 1097 bp, Homo sapiens
aagtgctgcgagccctgggccacgctggccgtgctggcagtgggccgcctcgatccctctgcagtctttcccttgaggctccaagaccagcaggtgaggcctcgcggcgctgaaaccgtgaggcccggaccacaggctccagatggaccctgggaaggacaaagagggggtgccccagccctcagggccgccagcaaggaagaaatttgtgatacccctcgacgaggatgaggtccctcctggagtggccaagcccttattccgatctacacagagccttcccactgtggacacctcggcccaggcggcccctcagacctacgccgaatatgccatctcacagcctctggaaggggctggggccacgtgccccacagggtcagagcccctggcaggagagacgcccaaccaggccctgaaacccggggcaaaatccaacagcatcattgtgagccctcggcagaggggcaatcccgtactgaagttcgtgcgcaacgtgccctgggaatttggcgacgtaattcccgactatgtgctgggccagagcacctgtgccctgttcctcagcctccgctaccacaacctgcacccagactacatccatgggcggctgcagagcctggggaagaacttcgccttgcgggtcctgcttgtccaggtggatgtgaaagatccccagcaggccctcaaggagctggctaagatgtgtatcctggccgactgcacattgatcctcgcctggagccccgaggaagctgggcggtacctggagacctacaaggcctatgagcagaaaccagcggacctcctgatggagaagctagagcaggacttcgtctcccgggtgactgaatgtctgaccaccgtgaagtcagtcaacaaaacggacagtcagaccctcctgaccacatttggatctctggaacagctcatcgccgcatcaagagaagatctggccttatgcccaggcctgggccctcagaaagcccggaggctgtttgatgtcctgcacgagcccttcttgaaagtaccctgatgaccccagctgccaaggaaacccccagtgtaataataaatcgtcctcccaggccaggctc

SEQ ID NO: 5503 - protein, 297 aa, Homo sapiens
MDPGKDKEGVPQPSGPPARKKFVIPLDEDEVPPGVAKPLFRSTQSLPTVDTSAQAAPQTYAEYAISQPLEGAGATCPTGSEPLAGETPNQALKPGAKSNSIIVSPRQRGNPVLKFVRNVPWEFGDVIPDYVLGQSTCALFLSLRYHNLHPDYIHGRLQSLGKNFALRVLLVQVDVKDPQQALKELAKMCILADCTLILAWSPEEAGRYLETYKAYEQKPADLLMEKLEQDFVSRVTECLTTVKSVNKTDSQTLLTTFGSLEQLIAASREDLALCPGLGPQKARRLFDVLHEPFLKVP

SEQ ID NO: 5504 - DNA, 3286 bp, Homo sapiens
aagttctgaacttgtgaggcatctgggcctccccagaagacatttaacacagaaagcacagccctactaactagtattcttacctgtctcttcaagaatttcagaccaatcgaccgtcctgtctctttaaggcttaggaagagcagtgtggctgcccctttaaggaggcgttgcaacaaaccatattggacagacgatgggggcgacccatcgggacccgacgggcctctgactccagcaatacagcgaatcagcggctttcgggaatacatttttcggaaaaagacttcttcctcggttttctgctctgcacacgttgaaattttccccagtttttcctgcagatcgggagtcgagcaatgcctacccccgcgctcccgcaccagttgggcgctcccggatgatgccctacccctttggatccacgtggtctgcaacctggtgcgagcagcccgggctacagggttgcctgaggtgtgggtcccaggatggaggagccccaggccggcgatgctgctcggttctcttgtccccccaactttaccgcgaagcccccagcctcagagtcccctcgtttctccttggaggcgctgacgggtccagatacggagctgtggcttattcaggcccctgcagactttgccccagaatgcttcaatgggcggcatgtgcctctctctggctcccagatcgtcaagggcaaattggcaggcaagcggcaccgctatcgagtcctcagcagctgtccccaagctggagaagcgaccctgctggccccctcaacggaggcaggaggtggactcacctgtgcctcagccccccagggcaccctaaggatccttgagggtccccagcaatccctgtcagggagccctctgcagcccatcccagcaagtcccccaccacagatccctcctggcctgaggcctcggttctgtgcctttgggggcaacccaccagtcacagggcctaggtcagccttggcccccaacctgctcacctcagggaagaagaaaaaggagatgcaggtgacagaggccccagtcactcaggaggcagtgaatgggcacggggccctggaggtggacatggctttggggtcgccagaaatggatgtgcggaagaagaagaagaaaaaaaatcagcagctgaaagaaccagaggcagcagggcctgtggggacagagcccacagtggagacactggagcctctgggagtgctgttcccgtccaccaccaagaagaggaagaagcccaaagggaaagaaaccttcgagccagaagacaagacagtgaagcaggaacagattaacactgagcctctagaagacacagtcctgtccccgaccaaaaagagaaagaggcaaaaggggacggaagggatggagccagaggagggggtgacagttgagtctcagccacaggtgaaggtggagccactggaggaagccatccctctgccccctacgaagaagaggaaaaaagaaaagggacagatggcaatgatggagccagggacggaggcgatggagccagtggagccggagatgaagcctctggagtccccaggggggaccatggcgcctcaacagccagaaggagcgaagcctcaggcccaggcagctctggcagctcccaaaaagaagacgaagaaagaaaaacagcaagatgccacagtggagccagagacagaggtggtggggcctgagctgccggatgaccttgagcctcaggcagctcccacatccaccaagaagaagaagaagaagaaagagagaggtcacacagtgactgagccaattcagccactagagcctgaactgccaggggagggacagcctgaagccagggcaactccgggatccaccaagaagaggaagaagcagagtcaggaaagccggatgccagagacagtgccccaagaggagatgccagggccgccactgaattcagagtctggggaggaggctcccacaggccgggacaagaagcggaagcagcagcagcagcagcctgtgtagtctgcccccgggaaactgaggaactaaagaaagctgaaggtgcccacctgggccaccagaaggtgacacccccagaatccctccccagagactgcaccagcgcagccagcaggagcctggcctgggaggacgatttattattacactgggggtttccttggcagctggggtcatcagggtactttcaagaagggctcgtgcaggacatcaaacagcctccgggcctggatgggagggagaaaaaaatgaggaaccagtcattaaaggagctgtttcctgggtaaatctagagtggggttttggttctttattttcccctataccctcaagcatttatccattgagttacaaacaatccagttacaatctttttaagttattattattattattattttttttttttttgagatggagtctcgctctgtcgcccaggttggagtgcagtggcgcaatctcggctcactgcaagctccgcctcccgggttcacgccattctcctgcctcagcctcctgagtagctgggactacaggcccctgcccagctaattttttgtatttttttttagtagagatggggtttcaccacgttagccaggatggtctcgatctcctgacctcctgatgcgcctgcctcagcctcccagtgctgggattataggtgtgagccactgcgcctggctaagttattattatttttttgagacagtctcctggtgtcacccaggctggagtgcagtggtgtgatcttggctcactgcaacctccgcctcctgggttccaacgattctcctgcctcagcctcccgagtagctgggcctaaaggtgcccaccactatacccggctaatttttgtatttttagtagagacaggggtttcaccatattggccaggctggtctcgaactcctgacctcgtgatccacctgccttgacctcccaaagtgctaggataacaggtgtgagccaccgcaccctgccaagttattttaaaatgtaccattattattgactatagtcacctggttgtgttatcaaatagtatgtcttattcattctttctttgtgtgtgtgtgtgtgtgtgtgtgtgtgtgtggtacccattaaccttccccatctccctgccagcccctaactaccctccccagcctccaggaactatccatccactcttatctccatgagttcaattgttttgatttttagatacacaaataaataagaacatgcaatgtttgtctttctgtgcctggcttatttcactt

SEQ ID NO: 5505 - protein, 510 aa, Homo sapiens
MEEPQAGDAARFSCPPNFTAKPPASESPRFSLEALTGPDTELWLIQAPADFAPECFNGRHVPLSGSQIVKGKLAGKRHRYRVLSSCPQAGEATLLAPSTEAGGGLTCASAPQGTLRILEGPQQSLSGSPLQPIPASPPPQIPPGLRPRFCAFGGNPPVTGPRSALAPNLLTSGKKKKEMQVTEAPVTQEAVNGHGALEVDMALGSPEMDVRKKKKKKNQQLKEPEAAGPVGTEPTVETLEPLGVLFPSTTKKRKKPKGKETFEPEDKTVKQEQINTEPLEDTVLSPTKKRKRQKGTEGMEPEEGVTVESQPQVKVEPLEEAIPLPPTKKRKKEKGQMAMMEPGTEAMEPVEPEMKPLESPGGTMAPQQPEGAKPQAQAALAAPKKKTKKEKQQDATVEPETEVVGPELPDDLEPQAAPTSTKKKKKKKERGHTVTEPIQPLEPELPGEGQPEARATPGSTKKRKKQSQESRMPETVPQEEMPGPPLNSESGEEAPTGRDKKRKQQQQQPV

SEQ ID NO: 5506 - DNA, 3609 bp, Homo sapiens
  unsure 3606: unknown base
cgcctccctccgccgccgcttgggccggctccgcgccccctccgcggcccccgcccgcccgcctgcccgccgcccccatggcgcccggggtccccgctgcacggggccactaggaccctcggcgtcccttcccctcccccgccctgccccctctcccgccgcgcggacccgggcgttctcggcgcccagcttttgagctcgcgtccccaggccggcggggggggaggggaagagaggggaccctgggacccccgccccccccacccggccgcccctgccccccgggacccggagaagatgtcttcgcggacggtgctggccccgggcaacgatcggaactcggacacgcatggcaccttgggcagtggccgctcctcggacaaaggcccgtcctggtccagccgctcactgggtgcccgttgccggaactccatcgcctcctgtcccgaggagcagccccacgtgggcaactaccgcctgctgaggaccattgggaagggcaactctgccaaagtcaagctggctcggcacatcctcactggtcgggaggttgccatcaagattatcgacaaaacccagctgaatcccagcagcctgcagaagctgttccgagaagtccgcatcatgaagggcctaaaccaccccaacatcgtgaagctctttgaggtgattgagactgagaagacgctgtacctggtgatggagtacgcaagtgctggagaagtgtttgactacctcgtgtcgcatggccgcatgaaggagaaggaagctcgagccaagttccgacagattgtttcggctgtgcactattgtcaccagaaaaatattgtacacagggacctgaaggctgagaacctcttgctggatgccgaggccaacatcaagattgctgactttggcttcagcaacgagttcacgctgggatcgaagctggacacgttctgcgggagccccccatatgccgccccggagctgtttcagggcaagaagtacgacgggccggaggtggacatctggagcctgggagtcatcctgtacaccctcgtcagcggctccctgcccttcgacgggcacaacctcaaggagctgcgggagcgagtactcagagggaagtaccgggtccctttctacatgtcaacagactgtgagagcatcctgcggagatttttggtgctgaacccagctaaacgctgtactctcgagcaaatcatgaaagacaaatggatcaacatcggctatgagggtgaggagttgaagccatacacagagcccgaggaggacttcggggacaccaagagaattgaggtgatggtgggtatgggctacacacgggaagaaatcaaagagtccttgaccagccagaagtacaacgaagtgaccgccacctacctcctgctgggcaggaagactgaggagggtggggaccggggcgccccagggctggccctggcacgggtgcgggcgcccagcgacaccaccaacggaacaagttccagcaaaggcaccagccacagcaaagggcagcggagttcctcttccacctaccaccgccagcgcaggcatagcgatttctgtggcccatcccctgcacccctgcaccccaaacgcagcccgacgagcacgggggaggcggagctgaaggaggagcggctgccaggccggaaggcgagctgcagcaccgcggggagtgggagtcgagggctgcccccctccagccccatggtcagcagcgcccacaaccccaacaaggcagagatcccagagcggcggaaggacagcacgagcacccccaacaacctccctcctagcatgatgacccgcagaaacacctacgtttgcacagaacgcccgggggctgagcgcccgtcactgttgccaaatgggaaagaaaacagctcaggcaccccacgggtgccccctgcctccccctccagtcacagcctggcacccccatcaggggagcggagccgcctggcacgcggttccaccatccgcagcaccttccatggtggccaggtccgggaccggcgggcagggggtgggggtggtgggggtgtgcagaatgggccccctgcctctcccacactggcccatgaggctgcacccctgcccgccgggcggccccgccccaccaccaacctcttcaccaagctgacctccaaactgacccgaagggttaccctcgatccctctaaacggcagaactctaaccgctgtgtttcgggcgcctctctgccccagggatccaagatcaggtcgcagacgaacctgagagaatcgggggacctgaggtcacaagttgccatctaccttgggatcaaacggaaaccgccccccggctgctccgattcccctggagtgtgaagctgaccagctcgcgccctcctgaggccctgatggcagctctgcgccaggccacagcagccgcccgctgccgctgccgccagccacagccgttcctgctggcctgcctgcacgggggtgcgggcgggcccgagcccctgtcccacttcgaagtggaggtctgccagctgccccggccaggcttgcggggagttctcttccgccgtgtggcgggcaccgccctggccttccgcaccctcgtcacccgcatctccaacgacctcgagctctgagccaccacggtcccagggcccttactcttcctctcccttgtcgccttcacttctacaggaggggaaggggccagggaggggattctccctttatcatcacctcagtttccctgaattatatttgggggcaaagattgtcccctctgctgttctctggggccgctcagcacagaagaaggatgagggggctcagcggggggagctggcaccttcctggagcctccagccagtcctgtcctccctcgccctaccaagagggcacctgaggagactttggggacagggcaggggcagggagggaaactgaggaaatcttccattcctcccaacagctcaaaattaggccttgggcaggggcagggagagctgctgagcctaaagactggagaatctgggggactgggagtgggggtcagagaggcagattccttcccctcccgtcccctcacgctcaaacccccacttcctgccccaggctggcgcggggcactttgtacaaatccttgtaaataccccacaccctcccctctgcaaaggtctcttgaggagctgccgctgtcacctacggtttttaagttattacaccccgaccctcctcctgtcagccccctcacctgcagcctgttgcccaataaatttaagagagtccccccctccccaatgctgaccctaggattttccttccctgccctcacctgcaaatgagttaaagaagaggcgtgggaatccaggcagtggtttttcctttcggagcctcggttttctcatctgcagaatgggagcggtgggggtgggaaggtaaggatggtcgtggaagaaggcaggatggaactcggcctcatccccgaggccccagttcctatatcgggccccccattcatccactcacactcccagccaccatgttacactggactctaagccacttcttactccagtagtaaatttattgcaataaacaatcattganccc

SEQ ID NO: 5507 - protein, 688 aa, Homo sapiens
MSSRTVLAPGNDRNSDTHGTLGSGRSSDKGPSWSSRSLGARCRNSIASCPEEQPHVGNYRLLRTIGKGNSAKVKLARHILTGREVAIKIIDKTQLNPSSLQKLFREVRIMKGLNHPNIVKLFEVIETEKTLYLVMEYASAGEVFDYLVSHGRMKEKEARAKFRQIVSAVHYCHQKNIVHRDLKAENLLLDAEANIKIADFGFSNEFTLGSKLDTFCGSPPYAAPELFQGKKYDGPEVDIWSLGVILYTLVSGSLPFDGHNLKELRERVLRGKYRVPFYMSTDCESILRRFLVLNPAKRCTLEQIMKDKWINIGYEGEELKPYTEPEEDFGDTKRIEVMVGMGYTREEIKESLTSQKYNEVTATYLLLGRKTEEGGDRGAPGLALARVRAPSDTTNGTSSSKGTSHSKGQRSSSSTYHRQRRHSDFCGPSPAPLHPKRSPTSTGEAELKEERLPGRKASCSTAGSGSRGLPPSSPMVSSAHNPNKAEIPERRKDSTSTPNNLPPSMMTRRNTYVCTERPGAERPSLLPNGKENSSGTPRVPPASPSSHSLAPPSGERSRLARGSTIRSTFHGGQVRDRRAGGGGGGGVQNGPPASPTLAHEAAPLPAGRPRPTTNLFTKLTSKLTRRVTLDPSKRQNSNRCVSGASLPQGSKIRSQTNLRESGDLRSQVAIYLGIKRKPPPGCSDSPGV

SEQ ID NO: 5508 - DNA, 2486 bp, Homo sapiens
acccggagcgggaagatggcggcggcgcaggaggcggacggggcccgcagcgccgtggtggcggccgggggaggcagctccggtcaggtgaccagcaatggcagcatcgggagggacccgccagcggagacccagcctcagaacccaccggcccagccggcacccaatgcctggcaggtcatcaaaggtgtgctgtttaggatcttcatcatctgggccatcagcagttggttccgccgagggccggcccctcaggaccaggcgggccccggaggagccccacgcgtcgccagccgcaacctgttccccaaagacactttaatgaacctgcatgtgtacatctcagagcacgagcactttacagacttcaacgccacgtcggcactcttctgggaacagcacgatcttgtgtatggcgactggactagcggcgagaactcagacggctgctacgagcactttgctgagctcgatatcccacagagcgtccagcagaacggctccatctacatccacgtttacttcaccaagagtggcttccacccagacccccggcagaaggccctgtaccgccggcttgccacagtccacatgtcccggatgatcaacaaatacaagcgcagacgatttcagaaaaccaagaacctgctgacaggagagacagaagcggacccagaaatgatcaagagggctgaggactatgggcctgtggaggtgatctcccattggcaccccaacatcaccatcaacatcgtggacgaccacacgccgtgggtgaagggcagtgtgccccctcccctggatcaatatgtgaagttcgacgccgtgagcggtgactactatcccatcatctacttcaatgactactggaacctgcagaaggactactaccccatcaacgagagcctggccagcctgccgctccgcgtctccttctgcccactctcgctttggcgctggcagctctatgctgcccagagcaccaagtcgccctggaacttcctgggcgatgagttgtacgagcagtcagatgaggagcaggactcggtgaaggtggccctgctggagaccaacccctacctgctggcgctcaccatcatcgtgtctatcgttcacagtgtcttcgagttcctggccttcaagaatgatatccagttctggaacagccggcagtccctggagggcctgtccgtgcgctccgtcttcttcggcgttttccagtcattcgtggtcctcctctacatcctggacaacgagaccaacttcgtggtccaggtcagcgtcttcattggggtcctcatcgacctctggaagatcaccaaggtcatggacgtccggctggaccgagagcacagggtggcaggaatcttcccccgcctatccttcaaggacaagtccacgtatatcgagtcctcgaccaaagtgtatgatgatatggcattccggtacctgtcctggatcctcttcccgctcctgggctgctatgccgtctacagtcttctgtacctggagcacaagggctggtactcctgggtgctcagcatgctctacggcttcctgctgaccttcggcttcatcaccatgacgccccagctcttcatcaactacaagctcaagtctgtggcccaccttccctggcgcatgctcacctacaaggccctcaacacattcatcgacgacctgttcgcctttgtcatcaagatgcccgttatgtaccggatcggctgcctgcgggacgatgtggttttcttcatctacctctaccaacggtggatctaccgcgtcgaccccacccgagtcaacgagtttggcatgagtggagaagaccccacagctgccgcccccgtggccgaggttcccacagcagcaggggccctcacgcccacacctgcacccaccacgaccaccgccaccagggaggaggcctccacgtccctgcccaccaagcccacccagggggccagctctgccagcgagccccaggaagcccctccaaagccagcagaggacaagaaaaaggattagtcgagactggtcctcacctgctccggctcctggcgaccactacccctgcgtcccggccccctcgcctcccctccctgtcgccctttccctggacagatcaggccggggcggtgggaggcccgcctcaggtcagggcccagcgtgtgacgtaggggccggggcaggccagggtttgtttgtggaggcgctgtctgtccctctgtccctctgtgtttccagccatctcgccctgccagcccagcaccactgggaatcatggtgaagctgatgcagcgttgccgagggggtgggttgggcgggggtggggccgggcccccctacgggatgcccacggccgttcatcatcttgtccctcgtccccctaccacactccccctcctagaccgccgccctttaacacagtctggatttaataaattcatatgggtgtttaacttaaactcaaaaaaaaaaaaaaaaaa

SEQ ID NO: 5509 - protein, 669 aa, Homo sapiens
MAAAQEADGARSAVVAAGGGSSGQVTSNGSIGRDPPAETQPQNPPAQPAPNAWQVIKGVLFRIFIIWAISSWFRRGPAPQDQAGPGGAPRVASRNLFPKDTLMNLHVYISEHEHFTDFNATSALFWEQHDLVYGDWTSGENSDGCYEHFAELDIPQSVQQNGSIYIHVYFTKSGFHPDPRQKALYRRLATVHMSRMINKYKRRRFQKTKNLLTGETEADPEMIKRAEDYGPVEVISHWHPNITINIVDDHTPWVKGSVPPPLDQYVKFDAVSGDYYPIIYFNDYWNLQKDYYPINESLASLPLRVSFCPLSLWRWQLYAAQSTKSPWNFLGDELYEQSDEEQDSVKVALLETNPYLLALTIIVSIVHSVFEFLAFKNDIQFWNSRQSLEGLSVRSVFFGVFQSFVVLLYILDNETNFVVQVSVFIGVLIDLWKITKVMDVRLDREHRVAGIFPRLSFKDKSTYIESSTKVYDDMAFRYLSWILFPLLGCYAVYSLLYLEHKGWYSWVLSMLYGFLLTFGFITMTPQLFINYKLKSVAHLPWRMLTYKALNTFIDDLFAFVIKMPVMYRIGCLRDDVVFFIYLYQRWIYRVDPTRVNEFGMSGEDPTAAAPVAEVPTAAGALTPTPAPTTTTATREEASTSLPTKPTQGASSASEPQEAPPKPAEDKKKD

SEQ ID NO: 5510 - DNA, 447 bp, Homo sapiens
gatgccaggccaaggtggagcaagcggtggagacagagccggagcccgagctgcgccagcagaccgagtggcagagcggccagcgctgggaactggcactgggtcgcttttgggattacctgcgcgccaagctggaggagcaggcccagcagatacgcctgcaggccgaggccttccaggcccgcctcaagagctggttcgagcccctggtggaagacatgcagcgccagtgggccgggctggtggagaaggtgcaggctgccgtgggcaccagcgccgcccctgtgcccagcgacaatcactgaacgccgaagcctgcagccatgcgaccccacgccaccccgtgcctcctgcctccgcgcagcctgcagcgggagaccctgtccccgccccagccgtcctcctggggtggaccctagtttaataaagattcaccaagtttcacgc

SEQ ID NO: 5511 - DNA, 1156 bp, Homo sapiens
cgcagcggaggtgaaggacgtccttccccaggagccgactggccaatcacaggcaggaagatgaaggttctgtgggctgcgttgctggtcacattcctggcaggatgccaggccaaggtggagcaagcggtggagacagagccggagcccgagctgcgccagcagaccgagtggcagagcggccagcgctgggaactggcactgggtcgcttttgggattacctgcgctgggtgcagacactgtctgagcaggtgcaggaggagctgctcagctcccaggtcacccaggaactgagggcgctgatggacgagaccatgaaggagttgaaggcctacaaatcggaactggaggaacaactgaccccggtggcggaggagacgcgggcacggctgtccaaggagctgcaggcggcgcaggcccggctgggcgcggacatggaggacgtgtgcggccgcctggtgcagtaccgcggcgaggtgcaggccatgctcggccagagcaccgaggagctgcgggtgcgcctcgcctcccacctgcgcaagctgcgtaagcggctcctccgcgatgccgatgacctgcagaagcgcctggcagtgtaccaggccggggcccgcgagggcgccgagcgcggcctcagcgccatccgcgagcgcctggggcccctggtggaacagggccgcgtgcgggccgccactgtgggctccctggccggccagccgctacaggagcgggcccaggcctggggcgagcggctgcgcgcgcggatggaggagatgggcagccggacccgcgaccgcctggacgaggtgaaggagcaggtggcggaggtgcgcgccaagctggaggagcaggcccagcagatacgcctgcaggccgaggccttccaggcccgcctcaagagctggttcgagcccctggtggaagacatgcagcgccagtgggccgggctggtggagaaggtgcaggctgccgtgggcaccagcgccgcccctgtgcccagcgacaatcactgaacgccgaagcctgcagccatgcgaccccacgccaccccgtgcctcctgcctccgcgcagcctgcagcgggagaccctgtccccgccccagccgtcctcctggggtggaccctagtttaataaagattcaccaagtttcacgc

SEQ ID NO: 5512 - protein, 317 aa, Homo sapiens [sequence omitted]

SEQ ID NO: 5513 - DNA, 1700 bp, Homo sapiens
ggcggcggcagcgggttcggttgcgcgtggcgcacggggtgggagcggagcccaggccgggagcaggcgccgccgccagcgaccatggggaacgtgttggctgccagctcgccgcccgcagggccgccaccgccgcctgcgccggccctcgtggggctgccgccacctccgccctcgccgccgggcttcacgctgccgccgctgggaggcagcctgggcgccggcaccagtacgagtcgaagttcggaacggacccccggggctgcaaccgccagcgcctcaggggccgccgaggatggggcctgcggctgcctgcccaacccgggcacattcgaggagtgccaccggaagtgcaaggagctgtttcccattcagatggagggtgtcaagctcacagtcaacaaagggttgagtaaccattttcaggtcaaccacacagtagccctcagcacaatcggggagtccaactaccacttcggggtcacatatgtggggacaaagcagctgagtcccacagaggcgttccctgtactggtgggtgacatggacaacagtggcagtctcaacgctcaggtcattcaccagctgggccccggtctcaggtccaagatggccatccagacccagcagtcgaagtttgtgaactggcaggtggacggggagtatcggggctctgacttcacagcagccgtcaccctggggaacccagacgtcctcgtgggttcaggaatcctcgtagcccactacctccagagcatcacgccttgcctggccctgggtggagagctggtctaccaccggcggcctggagaggagggcactgtcatgtctctagctgggaaatacacattgaacaactggttggcaacggtaacgttgggccaggcgggcatgcacgcaacatactaccacaaagccagtgaccagctgcaggtgggtgtggagtttgaggccagcacaaggatgcaggacaccagcgtctccttcgggtaccagctggacctgcccaaggccaacctcctcttcaaaggctctgtggatagcaactggatcgtgggtgccacgctggagaagaagctcccacccctgcccctgacactggcccttggggccttcctgaatcaccgcaagaacaagtttcagtgtggctttggcctcaccatcggctgagccctcctggcccccgccttccacgcccttccgattccacctccacctccacctccccctgccacagaggggagacctgagcccccctcccttccctccccccttgggggtcggggggggacattggaaaggagggaccccgccaccccagcagctgaggaggggattctggaactgaatggcgcttcgggattctgagtagcaggggcagcatgcccagtgggcctggggtcccgggagggattccggaattgaggggcacgcaggattctgagcaccaggggcagaggcggccagacaacctcagggaggagtgtcctggcgtccccatcctccaaagggcctgggcccgccccgagggggcagcgagaggagcttccccatccccggtcagtccaccctgccccgtccactttcccatctcctcggtataaatcatgtttataagttatggaagaaccgggacattttacagaaaaaaaacaaaaaacaacaaaaaatatacgtgggaaaaaaaaaaaaaaaaaaaa

SEQ ID NO: 5514 - protein, 361 aa, Homo sapiens
MGNVLAASSPPAGPPPPPAPALVGLPPPPPSPPGFTLPPLGGSLGAGTSTSRSSERTPGAATASASGAAEDGACGCLPNPGTFEECHRKCKELFPIQMEGVKLTVNKGLSNHFQVNHTVALSTIGESNYHFGVTYVGTKQLSPTEAFPVLVGDMDNSGSLNAQVIHQLGPGLRSKMAIQTQQSKFVNWQVDGEYRGSDFTAAVTLGNPDVLVGSGILVAHYLQSITPCLALGGELVYHRRPGEEGTVMSLAGKYTLNNWLATVTLGQAGMHATYYHKASDQLQVGVEFEASTRMQDTSVSFGYQLDLPKANLLFKGSVDSNWIVGATLEKKLPPLPLTLALGAFLNHRKNKFQCGFGLTIG

SEQ ID NO: 5515 - DNA, 1928 bp, Homo sapiens
gagcagaacagggaggctagagcgcagcgggaaccggcccggagccggagccggagccccacaggcacctactaaaccgcccagccgatcggcccccacagagtggcccgcgggcctccggccgggcccagtcccctcccgggccctccatggcccgggccgctgccctcctgccgtcgagatcgccgccgacgccgctgctgtggccgctgctgctgctgctgctcctggaaaccggagcccaggatgtgcgagttcaagtgctacccgaggtgcgaggccagctcgggggcaccgtggagctgccgtgccacctgctgccacctgttcctggactgtacatctccctggtgacctggcagcgcccagatgcacctgcgaaccaccagaatgtggccgccttccaccctaagatgggtcccagcttccccagcccgaagcctggcagcgagcggctgtccttcgtctctgccaagcagagcactgggcaagacacagaggcagagctccaggacgccacgctggccctccacgggctcacggtggaggacgagggcaactacacttgcgagtttgccaccttccccaaggggtccgtccgagggatgacctggctcagagtcatagccaagcccaagaaccaagctgaggcccagaaggtcacgttcagccaggaccctacgacagtggccctctgcatctccaaagagggccgcccacctgcccggatctcctggctctcatccctggactgggaagccaaagagactcaggtgtcagggaccctggccggaactgtcactgtcaccagccgcttcaccttggtgccctcgggccgagcagatggtgtcacggtcacctgcaaagtggagcatgagagcttcgaggaaccagccctgatacctgtgaccctctctgtacgctaccctcctgaagtgtccatctccggctatgatgacaactggtacctcggccgtactgatgccaccctgagctgtgacgtccgcagcaacccagagcccacgggctatgactggagcacgacctcaggcaccttcccgacctccgcagtggcccagggctcccagctggtcatccacgcagtggacagtctgttcaataccaccttcgtctgcacagtcaccaatgccgtgggcatgggccgcgctgagcaggtcatctttgtccgagaaacccccagggcctcgccccgagatgtgggcccgctggtgtggggggccgtgggggggacactgctggtgctgctgcttctggctggggggtccttggccttcatcctgctgagggtgaggaggaggaggaagagccctggaggagcaggaggaggagccagtggcgacgggggattctacgatccgaaagctcaggtgttgggaaatggggaccccgtcttctggacaccagtagtccctggtcccatggaaccagatggcaaggatgaggaggaggaggaggaggaagagaaggcagagaaaggcctcatgttgcctccacccccagcactcgaggatgacatggagtcccagctggacggctccctcatctcacggcgggcagtttatgtgtgacctggacacagacagagacagagccaggcccggccctcccgcccccgacctgaccacgccggcctagggttccagactggttggacttgttcgtctggacgacactggagtggaacactgcctcccactttcttgggacttggagggaggtggaacagcacactggacttctcccgtctctagggctgcatggggagcccggggagctgagtagtggggatccagagaggacccccgcccccagagacttggttttggctccagccttcccctggccccgtgacactcaggagttaataaatgccttggaggaaaacaaaaaaaaaaaaaaaaaaaaaa

SEQ ID NO: 5516 - protein, 479 aa, Homo sapiens
MARAAALLPSRSPPTPLLWPLLLLLLLETGAQDVRVQVLPEVRGQLGGTVELPCHLLPPVPGLYISLVTWQRPDAPANHQNVAAFHPKMGPSFPSPKPGSERLSFVSAKQSTGQDTEAELQDATLALHGLTVEDEGNYTCEFATFPKGSVRGMTWLRVIAKPKNQAEAQKVTFSQDPTTVALCISKEGRPPARISWLSSLDWEAKETQVSGTLAGTVTVTSRFTLVPSGRADGVTVTCKVEHESFEEPALIPVTLSVRYPPEVSISGYDDNWYLGRTDATLSCDVRSNPEPTGYDWSTTSGTFPTSAVAQGSQLVIHAVDSLFNTTFVCTVTNAVGMGRAEQVIFVRETPRASPRDVGPLVWGAVGGTLLVLLLLAGGSLAFILLRVRRRRKSPGGAGGGASGDGGFYDPKAQVLGNGDPVFWTPVVPGPMEPDGKDEEEEEEEEKAEKGLMLPPPPALEDDMESQLDGSLISRRAVYV

SEQ ID NO: 5517 - DNA, 2402 bp, Homo sapiens
agtctccgccgccgccgtgaacatggagcccccggacgcaccggcccaggcgcgcggggccccgcggctgctgttgctcgcagtcctgctggcggcgcacccagatgcccaggcggaggtgcgcttgtctgtacccccgctggtggaggtgatgcgaggaaagtctgtcattctggactgcacccctacgggaacccacgaccattatatgctggaatggttccttaccgaccgctcgggagctcgcccccgcctagcctcggctgagatgcagggctctgagctccaggtcacaatgcacgacacccggggccgcagtcccccataccagctggactcccaggggcgcctggtgctggctgaggcccaggtgggcgacgagcgagactacgtgtgcgtggtgagggcaggggcggcaggcactgctgaggccactgcgcggctcaacgtgtttgcaaagccagaggccactgaggtctcccccaacaaagggacactgtctgtgatggaggactctgcccaggagatcgccacctgcaacagccggaacgggaacccggcccccaagatcacgtggtatcgcaacgggcagcgcctggaggtgcccgtagagatgaacccagagggctacatgaccagccgcacggtccgggaggcctcgggcctgctctccctcaccagcaccctctacctgcggctccgcaaggatgaccgagacgccagcttccactgcgccgcccactacagcctgcccgagggccgccacggccgcctggacagccccaccttccacctcaccctgcactatcccacggagcacgtgcagttctgggtgggcagcccgtccaccccagcaggctgggtacgcgagggtgacactgtccagctgctctgccggggggacggcagccccagcccggagtatacgcttttccgccttcaggatgagcaggaggaagtgctgaatgtgaatctcgaggggaacttgaccctggagggagtgacccggggccagagcgggacctatggctgcagagtggaggattacgacgcggcagatgacgtgcagctctccaagacgctggagctgcgcgtggcctatctggaccccctggagctcagcgaggggaaggtgctttccttacctctaaacagcagtgcagtcgtgaactgctccgtgcacggcctgcccacccctgccctacgctggaccaaggactccactcccctgggcgatggccccatgctgtcgctcagttctatcaccttcgattccaatggcacctacgtatgtgaggcctccctgcccacagtcccggtcctcagccgcacccagaacttcacgctgctggtccaaggctcgccagagctaaagacagcggaaatagagcccaaggcagatggcagctggagggaaggagacgaagtcacactcatctgctctgcccgcggccatccagaccccaaactcagctggagccaattggggggcagccccgcagagccaatccccggacggcagggttgggtgagcagctctctgaccctgaaagtgaccagcgccctgagccgcgatggcatctcctgtgaagcctccaacccccacgggaacaagcgccatgtcttccacttcggcgccgtgagcccccagacctcccaggctggagtggccgtcatggccgtggccgtcagcgtgggcctcctgctcctcgtcgttgctgtcttctactgcgtgagacgcaaagggggcccctgctgccgccagcggcgggagaagggggctccgccgccaggggagccagggctgagccactcggggtcggagcaaccagagcagaccggccttctcatgggaggtgcctccggaggagccaggggtggcagcgggggcttcggagacgagtgctgagccaagaacctcctagaggctgtccctggacctggagctgcaggcatcagagaaccagccctgctcacgccatgcccgcccccgccttccctcttccctcttccctctccctgcccagccctcccttccttcctctgccggcaaggcagggacccacagtggctgcctgcctccgggagggaaggagagggagggtgggtgggtgggagggggccttcctccagggaatgtgactctcccaggccccagaatagctcctggacccaagcccaaggcccagcctgggacaaggctccgagggtcggctggccggagctatttttacctcccgcctcccctgctggtccccccacctgacgtcttgctgcagagtctgacactggattcccccccctcaccccgcccctggtcccactcctgcccccgccctacctccgccccaccccatcatctgtggacactggagtctggaataaatgctgtttgtcacatc

SEQ ID NO: 5518 - protein, 628 aa, Homo sapiens
MEPPDAPAQARGAPRLLLLAVLLAAHPDAQAEVRLSVPPLVEVMRGKSVILDCTPTGTHDHYMLEWFLTDRSGARPRLASAEMQGSELQVTMHDTRGRSPPYQLDSQGRLVLAEAQVGDERDYVCVVRAGAAGTAEATARLNVFAKPEATEVSPNKGTLSVMEDSAQEIATCNSRNGNPAPKITWYRNGQRLEVPVEMNPEGYMTSRTVREASGLLSLTSTLYLRLRKDDRDASFHCAAHYSLPEGRHGRLDSPTFHLTLHYPTEHVQFWVGSPSTPAGWVREGDTVQLLCRGDGSPSPEYTLFRLQDEQEEVLNVNLEGNLTLEGVTRGQSGTYGCRVEDYDAADDVQLSKTLELRVAYLDPLELSEGKVLSLPLNSSAVVNCSVHGLPTPALRWTKDSTPLGDGPMLSLSSITFDSNGTYVCEASLPTVPVLSRTQNFTLLVQGSPELKTAEIEPKADGSWREGDEVTLICSARGHPDPKLSWSQLGGSPAEPIPGRQGWVSSSLTLKVTSALSRDGISCEASNPHGNKRHVFHFGAVSPQTSQAGVAVMAVAVSVGLLLLVVAVFYCVRRKGGPCCRQRREKGAPPPGEPGLSHSGSEQPEQTGLLMGGASGGARGGSGGFGDEC

SEQ ID NO: 5519 - DNA, 1575 bp, Homo sapiens
tcccagccgcaccggtccttcccggcacacgcgaggctcccatggctctggcggtggccccgtgggggcgacagtgggaagaggcccgcgccctgggccgggcagtcaggatgctgcagcgcctagaagagcaatgcgtcgacccccggctgtccgtgagtcccccttcgctgcgggacctgctgccccgcacagcgcagctgcttcgagaggtggcccattctcggcgggcggccggcggaggcggccccgggggtcccggcggctctggggactttctactcatctacctggccaatctggaggccaagagcaggcaggtggccgcgctgctgcctccccggggccgaaggagtgccaacgacgagctcttccgggcgggctccagactcaggcgacagctggccaagctggccatcatcttcagccacatgcacgcagagctgcacgcactcttccccgggggaaagtactgtggacacatgtaccagctcaccaaggcccccgcccacaccttctggagggaaagttgcggagcccggtgtgtgctgccctgggctgagtttgagtccctcctgggcacctgccaccctgtggaaccaggctgcacagccctggccttgcgcaccaccattgacctcacctgcagcgggcacgtgtccatcttcgagttcgacgtcttcaccaggctctttcagccatggccaacactcctcaagaactggcagctcctggcagtcacccacccaggctacatggccttcctcacctatgatgaggtccaagagcgtctgcaggcctgcagagacaagccaggcagttacatcttccggcccagctgtactcgcctggggcagtgggccatcggctatgtgagctcagatggcagcatcctgcagaccatccctgccaacaaacccctgtcccaggtgctcctggagggacagaaggacggcttctacctctacccagatggaaagacccacaacccagacctgactgagctcggccaggcagaaccccagcagcgcatccacgtgtcagaggagcagctgcagctctactgggccatggactccacatttgagctctgcaagatctgtgctgagagcaacaaggatgtgaagattgagccgtgcgggcacctgctctgcagctgctgcctggctgcctggcagcactcggacagccagacctgccccttctgccgctgcgagatcaagggctgggaggccgtgagtatctaccagttctacggtcaggctactgctgaggactcagggaacagcagtgaccaggaaggcagggagttggagctggggcaggtgcccctttcggctcctccattgcccccacggccagatctgccccccaggaagcccagaaatgcccagccgaaagtgagactcctaaaggggaactcccctccagctgcgctgggaccccaggaccctgccccggcctgaaggccagggcacccagatgtgctgctcaagggagccccaagggctggaagggggttgtgaaaccgaaataaactgccaagcctggtctgtcaaaaaaaaaaaaaaaaaa

SEQ ID NO: 5520 - protein, 474 aa, Homo sapiens
MALAVAPWGRQWEEARALGRAVRMLQRLEEQCVDPRLSVSPPSLRDLLPRTAQLLREVAHSRRAAGGGGPGGPGGSGDFLLIYLANLEAKSRQVAALLPPRGRRSANDELFRAGSRLRRQLAKLAIIFSHMHAELHALFPGGKYCGHMYQLTKAPAHTFWRESCGARCVLPWAEFESLLGTCHPVEPGCTALALRTTIDLTCSGHVSIFEFDVFTRLFQPWPTLLKNWQLLAVTHPGYMAFLTYDEVQERLQACRDKPGSYIFRPSCTRLGQWAIGYVSSDGSILQTIPANKPLSQVLLEGQKDGFYLYPDGKTHNPDLTELGQAEPQQRIHVSEEQLQLYWAMDSTFELCKICAESNKDVKIEPCGHLLCSCCLAAWQHSDSQTCPFCRCEIKGWEAVSIYQFYGQATAEDSGNSSDQEGRELELGQVPLSAPPLPPRPDLPPRKPRNAQPKVRLLKGNSPPAALGPQDPAPA

SEQ ID NO: 5521 - DNA, 355 bp, Homo sapiens
accattggagctgaggcggctgctgctctcgggggaggtgttggcgctccggtcaggggaggggtctggctgggaggtggaagcaggccgggtggccttccccctcaggatgtcgatgaccctgcggctgcgcgccaccatgagcggcgtgtcgttgtggcagttcttgaggctgctgtcagcgccgctgcggaccagcgtgcgcaccagcgggaggagcccgcggccggacgctgagtgcagggcggagctgccggagtacatttgcgcgttcacgttggcgccgtgctgcagcagcagctgcaccatgctaaggctgttgttttccacggcgtggatgagcggggagcggccg

SEQ ID NO: 5522 - DNA, 1788 bp, Homo sapiens
gccccgtatgccccgcgggcgcatgtgacgaggggcccgtggactgcgcacccggcccaaggccactggactcccgggcgccgcgctgccgctccgcaagcgcccgctgcgccgcccttccccggagcccgccgctccccgcgggcgctgcgggccttgtcgtccccctggaccctctgcgcggcggctgcgacctgccggcggtccccgggcccccccacggcctggcccgccggaggcgctttactaccccggagccttactgcctttgtaccccactcgggccatgggctccccgtttcctctggtgaacctgcctacacccctataccccatgatgtgccccatggaacaccccctttctgctgacatcgccatggccacccgtgcagatgaggacggagacacgcctctccatattgctgtggtgcagggtaacctgccagctgtgcaccggctggtcaacctcttccagcaggggggccgggagctcgacatctacaacaacctacggcagacaccgctccacctggctgtgatcaccacattaccgtctgtggtccggctcctggtgacagctggtgccagccccatggcgctggaccgccatggccagacggccgctcacctggcgtgcgagcaccgcagcccgacctgcctgcgagccctgctggacagcgcagctccgggcacgttggacctggaggcccgcaattatgacgggctcaccgccctgcacgtggcagtgaacaccgagtgccaagaaaccgtgcagctcttgctagagcgcggtgccgacatcgacgcagtggacattaagagcggccgctccccgctcatccacgccgtggaaaacaacagccttagcatggtgcagctgctgctgcagcacggcgccaacgtgaacgcgcaaatgtactccggcagctccgccctgcactcagcgtccggccgccggctcctcccgctggtgcgcacgctggtccgcagcggcgctgacagcagcctcaagaactgccacaacgacacgccgctcatggtggcgcgcagccgcagggtcatcgacatcctgagggggaaggccacccggcctgcttccacctcccagccagacccctcccctgaccggagcgccaacacctcccccgagagcagcagccgcctcagctccaatggtcttctctccgcatcaccatcctcctcaccctcccagtctccccccagggacccccctggattccccatggctcctcccaatttcttccttccttccccatctccacccgccttcctgccctttgctggggtcctccgaggccctggccggccggtgcccccctccccagctccaggaggcagctgagggggatgggggggcagatcttggactcatgaggaggggcccccctgccctgtggggtcaacccttctggaaactgtgaagatctcactctgcccccccccatcttcgggaccaggatttgcacagaagcacatgcacctacccatacaccccctcttctgagcacagatgttcccccatctcgctccctcccaggactctgaccccagcattctcaggcaccagtccctgtccggaatgccacccacatcttccatttccatgtcccctcccagagctggtggacccagggaacagccactcccctccactctctaccagataactgaggaggggagaggtgggccgtaacgggcacggatcacgatgtaaattattaagcattttggttggatttcttttgtaataaactatttttgtaccat

SEQ ID NO: 5523 - DNA, 1869 bp, Homo sapiens
ccgagggtcaggctgcagaagcccagaatcccaccccagtccccaagtacagaggtcgctgtcaagatggagtttccaacccagtaaatccaagggccagaccgtgacctcataaagcatgatctccttctgtccagactgtggcaaaagtatccaagcggcattcaaattctgcccctactgtggaaattctttgcctgtagaggagcatgtagggtcccagacctttgtcaatccacatgtgtcatccttccaaggctcaaagagagggctgaactccagttttgaaacctctcctaagaaagtgaaatggtccagcaccgtcacctctccccgattatccctcttctcagatggtgacagttctgagtctgaagatactctgagttcctctgagagatccaaaggctccgggagcagacccccaacccccaaaagcagccctcagaagaccaggaagagccctcaggtgaccaggggtagccctcagaagaccagctgtagccctcagaagaccaggcagagccctcagacgctgaagcggagccgagtgaccacctcacttgaagctttgcccacagggacagtgctgacagacaagagtgggcgacagtggaagctgaagtccttccagaccagggacaaccagggcattctctatgaagctgcacccacctccaccctcacctgtgactcaggaccacagaagcaaaagttctcactcaaactggatgccaaggatgggcgcttgttcaatgagcagaacttcttccagcgggccgccaagcctctgcaagtcaacaagtggaagaagctgtactcgaccccactgctggccatccctacctgcatgggtttcggtgttcaccaggacaaatacaggttcttggtgttacccagcctggggaggagccttcagtcggccctggatgtcagcccaaagcatgtgctgtcagagaggtctgtgctgcaggtggcctgccggctgctggatgccctggagttcctccatgagaatgagtatgttcatggaaatgtgacagctgaaaatatctttgtggatccagaggaccagagtcaggtgactttggcaggctatggcttcgccttccgctattgcccaagtggcaaacacgtggcctacgtggaaggcagcaggagccctcacgagggggaccttgagttcattagcatggacctgcacaagggatgcgggccctcccgccgcagcgacctccagagcctgggctactgcatgctgaagtggctctacgggtttctgccatggacaaattgccttcccaacactgaggacatcatgaagcaaaaacagaagtttgttgataagccggggcccttcgtgggaccctgcggtcactggatcaggccctcagagaccctgcagaagtacctgaaggtggtgatggccctcacgtatgaggagaagccgccctacgccatgctgaggaacaacctagaagctttgctgcaggatctgcgtgtgtctccatatgaccccattggcctcccgatggtgccctaggtggaatccagaactttccatttgcagtgtgcaacagaaaaaaaaatgaagcaatgtgactcaaggcctgctgtttaatcacagataagcttctagaacaagccctggaatgtgcattcctgccactggtttcaggatactcatcagtcctgattagcctccggagggccccagtttccctcccgtgaatgtgaagttccccatcttggtggcctgcccttcagccagtgtcctagcaaagctggatggggttgggccggcccacaggggggacccctcctacccttgactcctctgtgctttggtaataaattgttttaccagag

SEQ ID NO: 5524 - protein, 474 aa, Homo sapiens
MISFCPDCGKSIQAAFKFCPYCGNSLPVEEHVGSQTFVNPHVSSFQGSKRGLNSSFETSPKKVKWSSTVTSPRLSLFSDGDSSESEDTLSSSERSKGSGSRPPTPKSSPQKTRKSPQVTRGSPQKTSCSPQKTRQSPQTLKRSRVTTSLEALPTGTVLTDKSGRQWKLKSFQTRDNQGILYEAAPTSTLTCDSGPQKQKFSLKLDAKDGRLFNEQNFFQRAAKPLQVNKWKKLYSTPLLAIPTCMGFGVHQDKYRFLVLPSLGRSLQSALDVSPKHVLSERSVLQVACRLLDALEFLHENEYVHGNVTAENIFVDPEDQSQVTLAGYGFAFRYCPSGKHVAYVEGSRSPHEGDLEFISMDLHKGCGPSRRSDLQSLGYCMLKWLYGFLPWTNCLPNTEDIMKQKQKFVDKPGPFVGPCGHWIRPSETLQKYLKVVMALTYEEKPPYAMLRNNLEALLQDLRVSPYDPIGLPMVP

SEQ ID NO: 5525 - DNA, 2010 bp, Homo sapiens
attcattccctgtcctcggatcacagtctcttctcactacagtgtcgccgcctctgcctgcgtagccccggccatggctctgtagcctcgacccctttgtgcccccggcccgtctccgcgctcaccacgcctgcgctctccgctcccaccttctttcttcagccgaggccgccgccgcctctccttgctgcagccatggagtcttccactttcgccttggtgcctgtcttcgcccacctgagcatcctccagagcctcgtgccagctgctggtgcagcctctcctgttgccatcagtgcccagcacctgtgctacagccatgtcactcctggcgaccctggggctggagctggacagggccctgctcccagctagtgggctgggatggctcgtagactatgggaaactccccccggcccctgcccccctggctccctatgaggtccttgggggagccctggagggcgggcttccagtggggggagagcccctggcaggtgatggcttctctgactggatgactgagcgagttgatttcacagctctcctccctctggagcctcccctaccccccggcaccctcccccaaccttccccaaccccacctgacctggaagctatggcctccctcctcaagaaggagctggaacagatggaagacttcttcctagatgccccgcccctcccaccaccctccccgccgccactaccaccaccaccactaccaccagccccctccctccccctgtccctcccctcctttgacctcccccagccccctgtcttggatactctggacttgctggccatctactgccgcaacgaggccgggcaggaggaagtggggatgccgcctctgcccccgccacagcagccccctcctccttctccacctcaaccttctcgcctggccccctacccacatcctgccaccacccgaggggaccgcaagcaaaagaagagagaccagaacaagtcggcggctctgaggtaccgccagcggaagcgggcagagggtgaggccctggagggcgagtgccaggggctggaggcacggaatcgcgagctgaaggaacgggcagagtccgtggagcgcgagatccagtacgtcaaggacctgctcatcgaggtttacaaggcccggagccagaggacccgtagctgctagaagggcaggggtgtggcttctgggggctggtcttcagctctggcgccttcatccccctgcctctaccttcattccaaacccctctcggccgggtgcagtggcttatgcttgtaatcccagcactttgggaggccaaggcaggaggatcgtttgaggccaggaggtcaataccagcctgggcaacatagtaagaccctgtctctattaaaaaaaaaaaatcaacccttcttccccaccaaaccacccaactcctctctactcttatccttttatcctctgtctctgcttatcacctctcttgcgtatttctggatctccttccctcctttctcgtccaaatcatgaaatgtttggccttagtcaatgtctatgcccgtcacataacagccgaggcaccgaggcccacagggaagcagctgggagcttggaaacctggtctcttgaatttcaaacctggtttcttacaggtggttgtctggggtgggtggagtggcgacaggatagagctgaaggactatgcaaatgaggaagtaagtcagggcgggctttgagaaggggacccatatcctacaggcaaaaagcaggctaggtgaccttgggacactacgctaagggagggaggctaaaggcggccaggtttgcagtgcgggaagatgagcaggccagtgggaggaggggcagggcagggctgtagttggtgactgggtgttcattttagctctaagaaaaaaaatcagtgtttcgtgaaggtgttggagaggggctgtgtctgggtgagggatggcggggtactgatttttttgggaggttatgagcaaaaataaaacgaaacatttcctctg

SEQ ID NO: 5526 - protein, 282 aa, Homo sapiens
MSLLATLGLELDRALLPASGLGWLVDYGKLPPAPAPLAPYEVLGGALEGGLPVGGEPLAGDGFSDWMTERVDFTALLPLEPPLPPGTLPQPSPTPPDLEAMASLLKKELEQMEDFFLDAPPLPPPSPPPLPPPPLPPAPSLPLSLPSFDLPQPPVLDTLDLLAIYCRNEAGQEEVGMPPLPPPQQPPPPSPPQPSRLAPYPHPATTRGDRKQKKRDQNKSAALRYRQRKRAEGEALEGECQGLEARNRELKERAESVEREIQYVKDLLIEVYKARSQRTRSC

SEQ ID NO: 5527 - DNA, 2319 bp, Homo sapiens
  unsure 1350: unknown base
gcgaccgtgattccccgctcgcgactccccaccccccagggctccctaaagagggccacgagctgcgaaagggcgggaaaggcagttggagaagaggtaagcggttactcactccatggctgcagcaaggagaggcggcggcggcctcggctgaagaaagaaggtgggagcggagagcgcaggcgtgaaacccaccttgtcccatccacatcaggacatcccagctggagttcaaccttcatcccttctgtggcagttaggagactgaatcaaggtccagagaaggtggaggaatcctgatactgagcggaagaaaatacacagatgtgcttccttcccagtcctgacaaatggcctttccttaagttcctcattaattcatatgaagacaacacatttggtgactaaatttggaatcagaggcttttaaagcctcccagctgctctgaccccaatatcaggaacttggcatctctgatctaacaagggcaccactaacaaggacaaagccaccatcattcaccttgattccgcacatgcccaacgatgacttctgtcctgggctaaccatcaaggccatgggtgctgagagagccccccagaggcagccatgcaccctgcacctcctcgtcctcgtccccatcctcctcagcctggtggcctcccaggactggaaggctgaacgcagccaagaccccttcgagaaatgcatgcaggatcctgactatgagcagctgctcaaggtggtgacctgggggctcaatcggaccctgaagccccagagggtgattgtggttggcgctggtgtggccgggctggtggccgccaaggtgctcagcgatgctggacacaaggtcaccatcctggaggcagataacaggatcgggggccgcatcttcacctaccgggaccagaacacgggctggattggggagctgggagccatgcgcatgcccagctctcacaggatcctccacaagctctgccagggcctggggctcaacctgaccaagttcacccagtacgacaagaacacgtggacggaggtgcacgaagtgaagctgcgcaactatgtggtggagaaggtgcccgagaagctgggctacgccttgcgtccccaggaaaagggccactcgcccgaagacatctaccagatggctctcaaccaggccctcaaagacctcaaggcactgggctgcagaaaggcgatgaagaagtttgaaaggcacacgctcttggaatatcttctcggggaggggaacctgagccggccggccgtgcagcttctgggagacgtgatgtccgaggatggcttcttctatctcagcttcgccgaggccctccgcgcancagctgcctcagcgacagactccagtacagccgcatcgtgggtggctgggacctgatgccgcgcgcgctgctgagctcgctgtccgggcttgtgctgttgaacgcgcccgtggtggcgatgacccagggaccgcacgatgtgcacgtgcagatcgagacctctcccccggcgcggaatctgaaggtgctgaaggccgacgtggtgctgctgacggcgagcggaccggcggtgaagcgcatcaccttctcgccgccgctgccccgccacatgcaggaggcgctgcggaggctgcactacgtgccggccaccaaggtgttcctaagcttccgcaggcccttctggcgcgaggagcacattgaaggcggccactcaaacaccgatcgcccgtcgcgcatgattttctacccgccgccgcgcgagggcgcgctgctgctggcctcgtacacgtggtcggacgcggcggcagcgttcgccggcttgagccgggaagaggcgttgcgcttggcgctcgacgacgtggcggcattgcacgggcctgtcgtgcgccagctctgggacggcaccggcgtcgtcaagcgttgggcggaggaccagcacagccagggtggctttgtggtacagccgccggcgctctggcaaaccgaaaaggatgactggacggtcccttatggccgcatctactttgccggcgagcacaccgcctacccgcacggctgggtggagacggcggtcaagtcggcgctgcgcgccgccatcaagatcaacagccggaaggggcctgcatcggacacggccagccccgaggggcacgcatctgacatggaggggcaggggcatgtgcatggggtggccagcagcccctcgcatgacctggcaaaggaagaaggcagccaccctccagtccaaggccagttatctctccaaaacacgacccacacgaggacctcgcattaaagtattttcggaaa

SEQ ID NO: 5528 - DNA, 1835 bp, Homo sapiens
gaagaggtaagcggttactcactccatggctgcagcaaggagaggcggcggcggcctcggctgaagaaagaagaaatcttcccaaggctgcagacaccgacggatttgctttgggagccagagtagctgccgccaccagagtccggagccatgagcgggtttaattttggaggcactggggcccctacaggcgggttcacgtttggcactgcaaagacggcaacaaccacacctgctacagggttttctttctccacctctggcactggagggtttaattttggggctcccttccaaccagccacaagtaccccttccaccggcctgttctcacttgccacccagactccggccacacagacgacaggcttcacttttggaacagcgactcttgcttcggggggaactggattttctttggggatcggtgcttcaaagctcaacttgagcaacacagctgccaccccagccatggcaaaccccagcggctttgggctgggcagcagcaacctcactaatgccatatcgagcaccgtcacctccagccagggcacagcacccaccggctttgtgtttggcccctccaccacctctgtggctccagctaccacatctggaggcttctcattcactggtggaagcacggcccaaccctccggtttcaacattggctcagcagggaattcagcccagcccacggcacctgccacgttgcccttcactccggccacgccagcagccaccacagcaggtgccacacagccagctgctcccacacccacagccaccatcaccagcactgggcccagcctctttgcgtcaatagcaactgctccaacctcatctgccaccactggactctccctctgtacccctgtgaccacagcgggcgcccccactgctgggacacagggcttcagcttaaaggcacctggagcagcttccggcacctccacaacaacatccaccgctgccaccgccaccgccaccaccaccagcagcagcagcaccaccggctttgccttgaatttaaaaccactggcgccagccgggatccccagcaatacagcagctgccgtgaccgctccacctggccctggcgcagctgcaggggcggctgccagctccgccatgacctacgcgcagctggagagcctgatcaacaaatggagcctggagctagaggaccaggagcggcacttcctccagcaggccacccaggtcaacgcctgggaccgcacgctgatcgagaatggagaaaagatcaccagcctgcaccgcgaggtggagaaggtgaagctggaccagaagaggctggaccaggagctcgacttcatcctgtcccagcagaaggagctggaagacctgctgagcccactggaggagttggtcaaggagcagagcgggaccatctacctgcagcacgcggatgaggagcgtgagaaaacctacaagctggctgagaacatcgatgcacagctcaagcgcatggcccaggatctcaaggacatcatcgagcacctgaacacgtccggggcccccgccgacaccagtgacccactgcagcagatctgcaagatcctcaatgcgcacatggactcactgcagtggatcgaccagaactcggccctgctgcagaggaaggtggaggaggtgaccaaggtgtgcgagggccggcgcaaggagcaggagcgcagcttccggatcacctttgactgagcgacagcagccctggggcccgcaggtccctagggagttcatgaggggaatgcgccctgttgtctgtagtttggggttgtggcaagatacttgtttgtttgtttctttctttcaca

SEQ ID NO: 5529 - DNA, 1102 bp, Homo sapiens
ctgtagtcctggcactttgagaggacaaagagggaggatcgcttgagcccaggagttgaagaccagggcaacagaaaatcttcccaaggctgcagacaccgacggatttgctttgggagccagagtagctgccgccaccagagtccggagccatgagcgggtttaattttggaggcactggggcccctacaggcgggttcacgtttggcactgcaaagacggcaacaaccacacctgctacagggttttctttctccacctctggcactggagggtttaattttggggctcccttccaaccagccacaagtaccccttccaccggcctgttctcacttgccacccagactccggccacacagacgacaggcttcacttttggaacagcgactcttgcttcggggggaactggattttctttggggatcggtgcttcaaagctcaacttgagcaacacagctgccaccccagccatggcaaaccccagcggctttgggctgggcagcagcaacctcactaatgccatatcgagcaccgtcacctccagccagggcacagcacccaccggctttgtgtttggcccctccaccacctctgtggctccagctaccacatctggaggcttctcattcactggtggaagcacggcccaaccctccggtttcaacattggctcagcagggaattcagcccagcccacggcacctgccacgttgcccttcactccggccacgccagcagccaccacagcaggtgccacacagccagctgctcccacacccacagccaccatcaccagcactgggcccagcctctttgcgtcaatagcaactgctccaacctcatctgccaccactggactctccctctgtacccctgtgaccacagcgggcgcccccactgctgggacacagggcttcagcttaaaggcacctggagcagcttccggcacctccacaacaacatccaccgctgccaccgccaccgccaccaccaccagcagcagcagcaccaccggctttgccttgaatttaaaaccactggcgccagccgggatccccagcaatacagcagctgccgtgaccgctccacctggccctgg

SEQ ID NO: 5530 - DNA, 1634 bp, Homo sapiens
ccggtcagctaaggccatgttaatacggggctgtcccatctctctgcggggcgcgacagctggaagagccgaacggataagagaagaggagagcgcggatggcgtcggggcgccccgaggagctatgctgcccatggtcgaggagccctggcggaggcagcgcgccgttgcctccacgacatcgcactggcccacagggctgccactgctgctcggcctcctgcgcccccaccagcaccacagccacccagtcccacacccagcccaccccggcctaccctggccagagaggacaacgaggaggacgaggatgagcccacagagacagagacctccggggagcagctgggcattagtgataatggagggctctttgtgatggatgaggacgccaccctccaggaccttccccccttctgtgagtcagaccccgagagtacagatgatggcagcctgagcgaggagacccccgccggcccccccacctgctcagtgcccccagcctcagccctacccacacagcagtacgccaagtccctgcctgtgtctgtgcccgtctggggcttcaaggagaagaggacagaggcgcggtcatcagatgaggagaatgggccgccctcttcgcccgacctggaccgcatcgcggcgagcatgcgcgcgctggtgctgcgagaggccgaggacacccaggtcttcggggacctgccacggccgcggcttaacaccagcgacttccagaagctgaagcggaaatattgaagtccagggagggagcgccccgggccgcgtccgccccgtcccacactacgcccccgccccactcccggggcctgctaatctgaggccgatccgggaccggcctccttgcgtctcccattcccaagattgtcccgcctctgccaatccccgccgtccttccagcccacgacctgccgcgccgaggagcggcatctgtcccgtttcccgattgggtctgtcgtctctctccgcctagcgacagattccttctattaagggattggctcgctgagttctaagctctaaatgggtcaactcctttgttttccgcctagcgacaagggatttgctcgcacggcattggctccatcccctagtcgctggacagctctttttttgattggctcaaatcctgtaaagggcttgaccagtctctacatagtcaccgtccgcttttcctgagttctccctcccaattggctccagcttcctgggggcgtggccaagccctcctcttcccagaattggcccggggccttcaatttacgttctttacactacggggactggggtcgtctttgcccacgtcccgacaacttgttccctgaccccctcagggatggccccaaactgtccctgcctctggcaccccctttcattggttccatccatccccacaacagcctgccaatcgaagcccgtccctgcatccaggatggtaccagctcccgcccctcgccccccacctccacaggtgccttaaagggccctcgtccacccaaggtggggggcaggggccctcactctccggccctggtgtgggggagagagtgaggggttgggggatcggcagttgggaggggcgctctgagattaaagagttttacctctgagat

SEQ ID NO: 5531 - DNA, 1780 bp, Homo sapiens
gccgggttgcaggcggggcacctcgggcaggacctccctggtcggaagtggccgtgagcccaagccgcggtcccgggccggcacccaggatgggcgaggtggaggccccgggccgcttgtggctcgagagccccctgggggagcgccccccatcttcctgccctcggacgggcaagccctggtcctgggcaggggacccctgacccaggttacggaccggaagtgctccagaactcaagcctgaagcaggccacactccccagaaatgagggacccaatcacacaaggatgcaaatcctgactccacccctccaatcctcagtggagctggtcgcagatcctgagacccggacagtggcagtgaaacagctgggagttaacccctcaactaccgggacccaggagttgaagccggggttggagggctctctgggggtgggggacacactgtatttggtcaatggcctccacccactgaccctgcgctgggaagagacccgcacaccagaatcccagccagatactccgcctggcacccctctggtgtcccaagatgagaagagagatgctgagctgccgaagaagcgtatgcggaagtcaaaccccggctgggagaacttggagaagttgctagtgttcaccgcagctggggtgaaaccccagggcaaggtggctggctttgatctggacgggacgctcatcaccacacgctctgggaaggtctttcccactggccccagtgactggaggatcttgtacccagagattccccgtaagctccgagagctggaagccgagggctacaagctggtgatcttcaccaaccagatgagcatcgggcgcgggaagctgccagccgaggagttcaaggccaaggtggaggctgtggtggagaagctgggggtccccttccaggtgctggtggccacgcacgcaggcttgtaccggaagccggtgacgggcatgtgggaccatctgcaggagcaggccaacgacggcacgcccatatccatcggggacagcatctttgtgggagacgcagccggacgcccggccaactgggccccggggcggaagaagaaagacttctcctgcgccgatcgcctgtttgccctcaaccttggcctgcccttcgccacgcctgaggagttctttctcaagtggccagcagccggcttcgagctcccagcctttgatccgaggactgtctcccgctcagggcctctctgcctccccgagtccagggccctcctgagcgccagcccggaggtggttgtcgcagtgggattccctggggccgggaagtccacctttctcaagaagcacctcgtgtcggccggatatgtccacgtgaacagggacacgctaggctcctggcagcgctgtgtgaccacgtgtgagacagccctgaagcaagggaaacgggtcgccatcgacaacacaaacccagacgccgcgagccgcgccaggtacgtccagtgtgcccgagccgcgggcgtcccctgccgctgcttcctcttcaccgccactctggagcaggcgcgccacaacaaccggtttcgagagatgacggactcctctcatatccccgtgtcagacatggtcatgtatggctacaggaagcagttcgaggccccaacgctggctgaaggcttctctgccatcctggagatcccgttccggctatgggtggagccgaggctggggcggctgtactgccagttctccgagggctgagccccgcccagctcccctccacaataaacgctgtttctccttg

SEQ ID NO: 5532 - DNA, 2329 bp, Homo sapiens
ggctgcggctgcagtggtggtggcgggtaccgcacggggtatggtccccgggtccgagggcccggcccgcgccgggagcgtggtggccgacgtggtgtttgtgattgagggtacggccaacctgggaccctacttcgaggggctccgcaagcactacctgctcccggccatcgagtattttaatggtggtcctcctgctgagacggacttcgggggagactatggggggacccagtacagcctcgtggtgttcaacacagtggactgcgctcccgagtcctacgtacaatgtcacgctcccaccagcagcgcctatgagtttgtcacctggctcgatggcattaagttcatgggcgggggtggtgagagctgcagcctcatcgcggaaggactcagcacagccttgcagctgtttgatgacttcaagaagatgcgcgagcagattggccagacgcaccgggtctgcctcctcatctgcaactcacccccatacttgttgcctgctgttgagagcaccacgtactctggatgcacaactgagaatcttgtgcagcagattggggagcgggggatccacttctccattgtgtctccccggaagctgcctgcgcttcggcttctgtttgagaaggcagcccccccggccttgctggagccgctgcagcctccgacagatgtgagccaggacccgaggcacatggtgctggttcggggactcgtgctgcctgttgggggtggctcagccctaggccccctccagtcaaagcagccagtccccctgcctcccgccgcaccctcaggtgccactctctcagcagccccccagcagcctctgccccccgtccccccgcagtaccaggttcccgggaacctgagtgcagctcaggtggccgcgcagaatgcagtggaggctgccaagaaccagaaggctgggctgggccctcgcttctcgcccatcacccctctccaacaagctgctcccggagtgggtccccccttcagccaggccccagctccccaactacccccaggaccccctggcgcccccaagccaccacctgcttcccagcccagtctggtctccactgtggcccctggctccggcctggctcccacggcacagcccggggcaccgtccatggcaggcactgtggccccaggaggggtgagcggcccttccccagcccagctgggagccccagccctcggtgggcagcagtcagtctccaataagcttctggcctggagcggggtcctggagtggcaagagaaacccaaacctgcctcagtggatgccaacaccaagctgacgcggtcactgccctgccaggtctacgtgaatcatggcgagaacctgaagacggagcagtggccccagaagctgatcatgcagctcatcccccagcagctgctgaccaccctgggccctttgttccggaactcaaggatggtccagttccatttcaccaacaaggacctggagtctctcaaaggcctctaccgcatcatgggcaacggcttcgcgggctgcgtgcacttcccccacacggcgccctgtgaggtgcgcgtgctcatgctcctgtactcgtccaagaagaagatcttcatgggcctcatcccctacgaccagagcggcttcgtcaacggcatccggcaggtcatcaccaaccacaagcaggtccagcagcagaagctggagcagcagcagcgaggaatggggggacagcaggcaccccccagggctggggcccattctggaggaccaagccaggccctcacagaatctgctccagctccgcccaccgcagccccagcctcagggtaccgtaggggcctctggggccacggggcagccccagccccaaggtactgcccagcccccgccaggtgcccctcaaggccctcctggagcagcttctggcccaccccctcctggacccatccttcggccccagaaccctggggccaaccctcagctgcgaagcctcctcctcaacccaccaccgccgcagactggggtgcccccaccccaggcctccctccaccacctgcccagtcctggcccgcacaacttccccctcgggctccactgccaggtaaggggacccgggggagggcagaggtctggactgagtgtcccagcagctcctgggctagagcaccaagaccaagtgctcctgggaagtaaagacataggatccaagaatgagggttcccccagccgggcctgcagcccagcgtcatggaggacgacatcctcatggatctcatctgaatccccaacacccaataaagttcctttttaacacaaaaaaaaaaaaaaaaaaaa

SEQ ID NO: 5533 - protein, 715 aa, Homo sapiens
MVPGSEGPARAGSVVADVVFVIEGTANLGPYFEGLRKHYLLPAIEYFNGGPPAETDFGGDYGGTQYSLVVFNTVDCAPESYVQCHAPTSSAYEFVTWLDGIKFMGGGGESCSLIAEGLSTALQLFDDFKKMREQIGQTHRVCLLICNSPPYLLPAVESTTYSGCTTENLVQQIGERGIHFSIVSPRKLPALRLLFEKAAPPALLEPLQPPTDVSQDPRHMVLVRGLVLPVGGGSALGPLQSKQPVPLPPAAPSGATLSAAPQQPLPPVPPQYQVPGNLSAAQVAAQNAVEAAKNQKAGLGPRFSPITPLQQAAPGVGPPFSQAPAPQLPPGPPGAPKPPPASQPSLVSTVAPGSGLAPTAQPGAPSMAGTVAPGGVSGPSPAQLGAPALGGQQSVSNKLLAWSGVLEWQEKPKPASVDANTKLTRSLPCQVYVNHGENLKTEQWPQKLIMQLIPQQLLTTLGPLFRNSRMVQFHFTNKDLESLKGLYRIMGNGFAGCVHFPHTAPCEVRVLMLLYSSKKKIFMGLIPYDQSGFVNGIRQVITNHKQVQQQKLEQQQRGMGGQQAPPRAGAHSGGPSQALTESAPAPPTAAPASGYRRGLWGHGAAPAPRYCPAPARCPSRPSWSSFWPTPSWTHPSAPEPWGQPSAAKPPPQPTTAADWGAPTPGLPPPPAQSWPAQLPPRAPLPGKGTRGRAEVWTECPSSSWARAPRPSAPGK

SEQ ID NO: 5534 - DNA, 1652 bp, Homo sapiens
ggcacgagggccctctggcggctccggaccacaggccgagttactctgattaccgccatgctccaagacccgcactgacagtccccacgtgagggaccgcggtgggagtcctaaatgggggaggaggggacgggcggcactgtgcatctgctgtgcctcgcggcctccagcggggtccccctattctgcaggagcagtcgcggcggcgcccccgcccgtcagcagctcccgttctctgtcatcggttccctcaatggagtccacatgtttgggcagaatctggaggtgcagctgagctctgcgaggaccgagaacacgactgtggtgtggaaaagcttccatgacagcatcaccctcattgttctgtcatctgaggtgggcatctctgagctgaggctggagagactactccaaatggtgtttggagccatggtccttcttgtgggacttgaagaactgaccaatatccgcaacgtggagagactgaagaaggacttgagggccagttattgcctcatcgacagcttcctgggggactcggagctcatcggggacctgacccagtgtgtggactgcgtgattcctccagaggggtccctcttgcaggaagccctctccgggttcgctgaggccgcgggcacgaccttcgtcagtctggtggtgtccggccgggtggtggcagcaacagagggttggtggcggctggggacgcccgaggccgtgctgctcccctggctggtggggtccctgccgccgcagaccgctcgcgactacccggtgtacctgccgcacgggagccccacggtcccacaccggctcctgaccctgactctgctgccgagcctggagctgtgtctactctgcgggccgagcccacccctcagccagttgtatccacagcttctggagcgctggtggcagccactgctggacccgttgcgggcctgtctgccgttgggaccccgggcgctgcccagtggcttcccccttcacacagacatcctcgggctgctgctcctccacctggaactgaagcgctgcctcttcaccgtggagcccttgggggataaagagccttcaccagaacagcgccggcgcctcctccgaaacttctataccctggtcacctccacgcacttcccaccagagccagggccaccagagaagacagaagatgaggtctaccaggcccagctgcccagagcttgctacctggtgttggggactgaggaaccaggcacaggagtgcgtctggtggccttgcagctggggcttcggcggctgctgctgctgctgtctccccagagtcccacccatgggctgcgaagcctggccacccacactctgcatgccctcaccccacttctttgactacctagcagtgggtgatggacacagacatggggctgttagcgtctctctgtttattcgctcacaataatacacagcccctggatggggagggggtaggaggggctacaacagggtggggtgggaggggaggagacatccacttccctggcccctctcccctctgtgcttgggggggaaagggagggagggggactccccctaaccccccagaatgtaaacagcagcagatgaacaaaaataaaaatacaaaaggccgaaaaaaaaaaaaaaaaaaaaaa

SEQ ID NO: 5535 - protein, 418 aa, Homo sapiens
MGEEGTGGTVHLLCLAASSGVPLFCRSSRGGAPARQQLPFSVIGSLNGVHMFGQNLEVQLSSARTENTTVVWKSFHDSITLIVLSSEVGISELRLERLLQMVFGAMVLLVGLEELTNIRNVERLKKDLRASYCLIDSFLGDSELIGDLTQCVDCVIPPEGSLLQEALSGFAEAAGTTFVSLVVSGRVVAATEGWWRLGTPEAVLLPWLVGSLPPQTARDYPVYLPHGSPTVPHRLLTLTLLPSLELCLLCGPSPPLSQLYPQLLERWWQPLLDPLRACLPLGPRALPSGFPLHTDILGLLLLHLELKRCLFTVEPLGDKEPSPEQRRRLLRNFYTLVTSTHFPPEPGPPEKTEDEVYQAQLPRACYLVLGTEEPGTGVRLVALQLGLRRLLLLLSPQSPTHGLRSLATHTLHALTPLL

SEQ ID NO: 5536 - DNA, 3499 bp, Homo sapiens
cggctcagagctccggaccgcgggcggaggggaggggcagggggcggtgccacggcctgccagcccgcccgcccgcccgccagccagccctccccgcggccggctcggctccttggcgctgcctggggtcctttccgcccggtccccgcttgccagcccccgctgctctgtgccctgtccggccaggcctggagccgacaccaccgccatcatgccggccgtgtccaagggcgatgggatgcgggggctcgcggtgttcatctccgacatccggaactgtaagagcaaagaggcggaaattaagagaatcaacaaggaactggccaacatccgctccaagttcaaaggagacaaagccttggatggctacagtaagaaaaaatatgtgtgtaaactgcttttcatcttcctgcttggccatgacattgactttgggcacatggaggctgtgaatctgttgagttccaataaatacacagagaagcaaataggttacctgttcatttctgtgctggtgaactcgaactcggagctgatccgcctcatcaacaacgccatcaagaatgacctggccagccgcaaccccaccttcatgtgcctggccctgcactgcatcgccaacgtgggcagccgggagatgggcgaggcctttgccgctgacatcccccgcatcctggtggccggggacagcatggacagtgtcaagcagagtgcggccctgtgcctccttcgactgtacaaggcctcgcctgacctggtgcccatgggcgagtggacggcgcgtgtggtacacctgctcaatgaccagcacatgggtgtggtcacggccgccgtcagcctcatcacctgtctctgcaagaagaacccagatgacttcaagacgtgcgtctctctggctgtgtcgcgcctgagccggatcgtctcctctgcctccaccgacctccaggactacacctactacttcgtcccagcaccctggctctcggtgaagctcctgcggctgctgcagtgctacccgcctccagaggatgcggctgtgaaggggcggctggtggaatgtctggagactgtgctcaacaaggcccaggagccccccaaatccaagaaggtgcagcattccaacgccaagaacgccatcctcttcgagaccatcagcctcatcatccactatgacagtgagcccaacctcctggttcgggcctgcaaccagctgggccagttcctgcagcaccgggagaccaacctgcgctacctggccctggagagcatgtgcacgctggccagctccgagttctcccatgaagccgtcaagacgcacattgacaccgtcatcaatgccctcaagacggagcgggacgtcagcgtgcggcagcgggcggctgacctcctctacgccatgtgtgaccggagcaatgccaagcagatcgtgtcggagatgctgcggtacctggagacggcagactacgccatccgcgaggagatcgtcctgaaggtggccatcctggccgagaagtacgccgtggactacagctggtacgtggacaccatcctcaacctcatccgcattgcgggcgactacgtgagtgaggaggtgtggtaccgtgtgctacagatcgtcaccaaccgtgatgacgtccagggctatgccgccaagaccgtctttgaggcgctccaggcccctgcctgtcacgagaacatggtgaaggttggcggctacatccttggggagtttgggaacctgattgctggggacccccgctccagccccccagtgcagttctccctgctccactccaagttccatctgtgcagcgtggccacgcgggcgctgctgctgtccacctacatcaagttcatcaacctcttccccgagaccaaggccaccatccagggcgtcctgcgggccggctcccagctgcgcaatgctgacgtggagctgcagcagcgagccgtggagtacctcaccctcagctcagtggccagcaccgacgtcctggccacggtgctggaggagatgccgcccttccccgagcgcgagtcgtccatcctggccaagctgaaacgcaagaaggggccaggggccggcagcgccctggacgatggccggagggaccccagcagcaacgacatcaacgggggcatggagcccacccccagcactgtgtcgacgccctcgccctccgccgacctcctggggctgcgggcagcccctcccccggcagcacccccggcttctgcaggagcagggaaccttctggtggacgtcttcgatggcccggccgcccagcccagcctggggcccacccccgaggaggccttcctcagcgagctggagccgcctgcccccgagagccccatggctttgctggctgacccagctccagctgctgacccaggtcctgaggacatcggccctcccattccggaagccgatgagttgctgaataagtttgtgtgtaagaacaacggggtcctgttcgagaaccagctgctgcagatcggagtcaagtcagagttccgacagaacctgggccgcatgtatctcttctatggcaacaagacctcggtgcagttccagaatttctcacccactgtggttcacccgggagacctccagactcagctggctgtgcagaccaagcgcgtggcggcgcaggtggacggcggcgcgcaggtgcagcaggtgctcaatatcgagtgcctgcgggacttcctgacgcccccgctgctgtccgtgcgcttccggtacggtggcgccccccaggccctcaccctgaagctcccagtgaccatcaacaagttcttccagcccaccgagatggcggcccaggatttcttccagcgctggaagcagctgagcctccctcaacaggaggcgcagaaaatcttcaaagccaaccaccccatggacgcagaagttactaaggccaagcttctggggtttggctctgctctcctggacaatgtggaccccaaccctgagaacttcgtgggggcggggatcatccagactaaagccctgcaggtgggctgtctgcttcggctggagcccaatgcccaggcccagatgtaccggctgaccctgcgcaccagcaaggagcccgtctcccgtcacctgtgtgagctgctggcacagcagttctgagccctggactctgccccgggggatgtggccggcactgggcagccccttggactgaggcagttttggtggatgggggacctccactggtgacagagaagacaccagggtttgggggatgcctgggactttcctccggccttttgtatttttatttttgttcatctgctgctgtttacattctggggggttagggggagtccccctccctccctttcccccccaagcacagaggggagaggggccagggaagtggatgtctcctcccctcccaccccaccctgttgtagcccctcctaccccctccccatccaggggctgtgtattattgtgagcgaataaacagagagacgctaa

SEQ ID NO: 5537 - DNA, 558 bp, Homo sapiens
aggcgcagacggggaagcggagccaacatgccagtggcccggagctgggtttgtcacaaaacttatgtgaccccgcggagacccttcgagaaatctcgtctcgaccaagagctgaagctgatcggcaacgtcctgctgcggcggctgctccgcattggggtgctggatgagggcaagacgaagctggattacatcctgggcctgaagatagaggatttcttagagagacgcctacagacccaggtcttcaagctgggcttggccaagtccatccaccacgctggcgtactgatccgccagcgccgtgtcagggtccgcaatcaggtggcgaacatcccgtccttcattgtccgcctggattcccagaagcgcatcgacttgtctctgcgctctccctatggggtggccgccccggccgcgtgaagaggaagaacgccaagaagggccagggtgagggtggggctggagacgacgaggaggaggattaagtccacctgtccctcctgggctgctggattgtctcgttttcctgccaaataaacaggatcagcactttac

SEQ ID NO: 5538 - protein, 131 aa, Homo sapiens
MPVARSWVCHKTYVTPRRPFEKSRLDQELKLIGNVLLRRLLRIGVLDEGKTKLDYILGLKIEDFLERRLQTQVFKLGLAKSIHHAGVLIRQRRVRVRNQVANIPSFIVRLDSQKRIDLSLRSPYGVAAPAA

SEQ ID NO: 5539 - DNA, 1313 bp, Homo sapiens
gtgggcagccgaggccgcgaactgcatcatggagaattttgtagccaccttggctaatgggatgagcctccagccgcctcttgaagaagtgtcctgtggccaggcggaaagcagtgagaagcccaacgctgaggacatgacatccaaagattactactttgactcctacgcacactttggcatccacgaggagatgctgaaggacgaggtgcgcaccctcacttaccgcaactccatgtttcataaccggcacctcttcaaggacaaggtggtgctggacgtcggctcgggcaccggcatcctctgcatgtttgctgccaaggccggggcccgcaaggtcatcgggatcgtgtgttccagtatctctgattatgcggtgaagatcgtcaaagccaacaagttagaccacgtggtgaccatcatcaaggggaaggtggaggaggtggagctcccagtggagaaggtggcatcatcatcagcgagtggatgggctactgcctcttctacgagtccatgctcaacaccgtgctctatgcccgggacaagtgtggcgcccgatggcctcatcttcccagaccgggccacgctgtatgtgacggccatcgaggaccggcagtacaaagactacaagatccactggtgggagaacgtgtatggcttcgacatgtcttgcatcaaagatgtggccattaaggagcccctagtggatgtcgtggaccccaaacagctggtcaccaacgcctgcctcataaaggaggtggacatctataccgtcaaggtggaagacctgaccttcacctccccgttctgcctgcaagtgaagcggaatgactacgtgcacgccctggtggcctacttcaacatcgagttcacacgctgccacaagaggaccggcttctccaccagccccgagtccccgtacacgcactggaagcagacggtgttctacatggaggactacctgaccgtgaagacgggcgaggagatcttcggcaccatcggcatgcggcccaacgccaagaacaaccgggacctggacttcaccatcgacctggacttcaagggccagctgtgcgagctgtcctgctccaccgactaccggatgcgctgaggcccggctctcccgccctgcacgagcccaggggctgagcgttcctaggcggtttcggggctcccccttcctctccctccctcccgcagaagggggttttaggggcctgggctggggggatggggagggcacatcgtgactgtgtttttcataacttatgtttttatatggttgcatttacgccaataaatcctcagctggg

SEQ ID NO: 5540 - protein, 360 aa, Homo sapiens
MENFVATLANGMSLQPPLEEVSCGQAESSEKPNAEDMTSKDYYFDSYAHFGIHEEMLKDEVRTLTYRNSMFHNRHLFKDKVVLDVGSGTGILCMFAAKAGARKVIGIVCSSISDYAVKIVKANKLDHVVTIIKGKVEEVELPVEKVASSSASGWATASSTSPCSTPCSMPGTSVAPDGLIFPDRATLYVTAIEDRQYKDYKIHWWENVYGFDMSCIKDVAIKEPLVDVVDPKQLVTNACLIKEVDIYTVKVEDLTFTSPFCLQVKRNDYVHALVAYFNIEFTRCHKRTGFSTSPESPYTHWKQTVFYMEDYLTVKTGEEIFGTIGMRPNAKNNRDLDFTIDLDFKGQLCELSCSTDYRMR

SEQ ID NO: 5541 - DNA, 1687 bp, Homo sapiens
aagtaagtatccccactttcagggtagcatcctctttccctagttatttcagtgcagaatcgattcacgtgtaagcctctacctcctgcacttaccccaatgtagacccccttccacagtccccctacagaagatctcccaaaacatttccaacacagaacttccattcaattcccctccgactgcccgcctccctcctccaggacagagcacgccccaggtttcgagactgaactacccccatctacggagtccacccctccctctctagaaccccctcagtgtagacgcctcctcttttcctctttcctccctactttttctagtttttctgcagccgacctccagcgtcggccactgtagctccttccttgctccactttccccagagtacacagcctgcctttccactctccgtgcagacccatcctctttcccgctcctcgctctcggacgccaccaacgctctcccgggctcttccgcgttacctacgatggaaggtcggggcgtgcgggcagctggaacccacccctgtcttggagctccgggtagctctcaaactcgaggctgcgcaccccctttcccgtcagctgagctctagagcgctggggctttctttttgatcgacttcttgaaataaaaccaactttatcattctttgggtaacagacccaaaagccgatgggacggcccgctgggctgttcccgcccctatgcccttttttgggtttccggccagaggcatgctgggagcgtcacatgcaaattgagcgtgcacccagcgttccgccctttctacgctgggccggttatcgacccggcccagtgcgcaggcgcgggaaagttgaactaataaagtttgtacgagttcagtggaggagaccgcaagttgagtggaggaggcggcggtggggccccggaccaggtgcctccatggcaggctctgaagagctggggctccgggaagacacgctgagggtcctagctgccttccttaggcgtggtgaggctgccgggtctcctgttccaactccacctagaagccctgcccaagaagagccaacagacttcctgagccgccttcgaagatgtcttccctgctccctggggcgaggagcagccccctctgagtcccctcggccttgctctctgcccatccgcccctgctatggtttagagcctggcccagctactccagacttctatgctttggtggcccagcggctggaacagctggtccaagagcagctgaaatctccgcccagcccagaattacagggtcccccatcgacagagaaggaagccatactgcggaggctggtggccctgctggaggaggaggcagaagtcattaaccagaagctggcctcggaccccgccctgcgcagcaagctggtccgcctgtcctccgactctttcgcccgcctggtggagctgttctgtagccgggatgacagctctcgcccaagccgagcatgccccgggcccccgcctccttccccggagcccctggcccgcctggccctagccatggagctgagccggcgcgtggccgggctggggggcaccctggccggactcagcgtggagcacgtgcacagcttcacgccctggatccaggcccacgggggctgggagggcatcctggctgtttcacccgtggacttgaacttgccattggactga

SEQ ID NO: 5542 - DNA, 1407 bp, Homo sapiens
ggttccagctgcccgcacgccccgaccttccatcgtaggccggaccatgggaaccccaaagccacggatcctgccctggctggtgtcgcagctggacctggggcaactggagggcgtggcctgggtgaacaagagccgcacgcgcttccgcatcccttggaagcacggcctacggcaggatgcacagcaggaggatttcggaatcttccaggcctgggccgaggccactggtgcatatgttcccgggagggataagccagacctgccaacctggaagaggaatttccgctctgccctcaaccgcaaagaagggttgcgtttagcagaggaccggagcaaggaccctcacgacccacataaaatctacgagtttgtgaactcaggagttggggacttttcccagccagacacctctccggacaccaatggtggaggcagtacttctgatacccaggaagacattctggatgagttactgggtaacatggtgttggccccactcccagatccgggacccccaagcctggctgtagcccctgagccctgccctcagcccctgcggagccccagcttggacaatcccactcccttcccaaacctggggccctctgagaacccactgaagcggctgttggtgccgggggaagagtgggagttcgaggtgacagccttctaccggggccgccaagtcttccagcagaccatctcctgcccggagggcctgcggctggtggggtccgaagtgggagacaggacgctgcctggatggccagtcacactgccagaccctggcatgtccctgacagacaggggagtgatgagctacgtgaggcatgtgctgagctgcctgggtgggggactggctctctggcgggccgggcagtggctctgggcccagcggctggggcactgccacacatactgggcagtgagcgaggagctgctccccaacagcgggcatgggcctgatggcgaggtccccaaggacaaggaaggaggcgtgtttgacctggggcccttcattgtagatctgattaccttcacggaaggaagcggacgctcaccacgctatgccctctggttctgtgtgggggagtcatggccccaggaccagccgtggaccaagaggctcgtgatggtcaaggttgtgcccacgtgcctcagggccttggtagaaatggcccgggtagggggtgcctcctccctggagaatactgtggacctgcacatttccaacagccacccactctccctcacctccgaccagtacaaggcctacctgcaggacttggtggagggcatggatttccagggccctggggagagctgagccctcgctcctcatggtgtgcctccaacccccctgttccccaccacctcaaccaataaactggttcctgctatgaa

SEQ ID NO: 5543 - protein, 427 aa, Homo sapiens
MGTPKPRILPWLVSQLDLGQLEGVAWVNKSRTRFRIPWKHGLRQDAQQEDFGIFQAWAEATGAYVPGRDKPDLPTWKRNFRSALNRKEGLRLAEDRSKDPHDPHKIYEFVNSGVGDFSQPDTSPDTNGGGSTSDTQEDILDELLGNMVLAPLPDPGPPSLAVAPEPCPQPLRSPSLDNPTPFPNLGPSENPLKRLLVPGEEWEFEVTAFYRGRQVFQQTISCPEGLRLVGSEVGDRTLPGWPVTLPDPGMSLTDRGVMSYVRHVLSCLGGGLALWRAGQWLWAQRLGHCHTYWAVSEELLPNSGHGPDGEVPKDKEGGVFDLGPFIVDLITFTEGSGRSPRYALWFCVGESWPQDQPWTKRLVMVKVVPTCLRALVEMARVGGASSLENTVDLHISNSHPLSLTSDQYKAYLQDLVEGMDFQGPGES

SEQ ID NO: 5544 - DNA, 4378 bp, Homo sapiens
ctggggtgtctgtgctgggtccagcgcccacccaagcacagggtggagtgggaggaggtggaggagaggaggggtgccagaggggatgctgagggagatagtgtggggcccttgaggtcttcatgtctatcctctacttccatcctttctcccgggacctccactccaaactctcccccctggacccccaggtgaccatggaggaagaagatgagtctcgagggaagacagaggagtcgggggaggatcggggcgatggtccgccagacagagaccccacgctttctccttctgcctttatcctgcgagccatccagcaggctgtgggaagctccctgcagggggacctgcccaatgataaagatggctctcggtgtcatggccttcgatggcggcgctgccggagtccacggtcagagccccgttcccaggaatcagggggcactgacacggctactgtgttggacatggccacggacagcttcctcgcagggctggtgagtgtcctggatcccccggatacctgggttcccagccgcctggacctgcggcctggcgaaagtgaggacatgctggagctggtggctgaggtccgaatcggggacagagatcccatccctctgcctgtgcccagcctgctgccccgtctcagggcctggaggacgggcaaaacggtttctccacagtcgaactcctctaggcccacctgtgcccgtcacctcaccttgggcacgggagacgggggccctgccccaccccctgccccctcctctgcatcctcctccccttccccttctccctcatcttcctccccttcccctcccccacccccaccgccccctgcacccccagccccacctgccccccgattcgatatctatgaccccttccaccccaccgacgaggcctactctccaccgcctgctccggagcaaaagtacgacccttttgagcccaccggctccaaccccagctcatcagcggggaccccctcacctgaggaggaagaggaggaggaagaggaagaagaagaggaagaggaagacgaggaggaggaggaaggcctgtcccagagcatcagccgcatctcggagaccctggcgggcatctacgatgacaacagcctgagccaggacttcccaggtgacgagagcccccgcccggacgcgcagcccacacagccgactcccgcccctggaacgccgccccaggtggactccacccgggctgatggagccatgcgccggcgggtcttcgtggtggggaccgaggcagaggcttgtcgggaaggcaaggtctcggtggaggtggtgaccgctggtggagccgccctcccgccgcccctgctgccgcccggcgactcggagatcgaggaaggggagatcgtccagccggaggaggagcccaggctggcgctgtccctcttccgccccggcggccgggccgcccggcctacaccggccgcctcggccacccccacggcccagccccttcctcagcctcccgctccgcgggcccccgagggggacgacttcttgtccctgcatgcggagtcggacggcgagggcgccctgcaggtggacctaggggagccggctcccgcgccgcccgccgccgactcgcgctggggcggcctggacctgcgccgcaagatcctgacccaacggcgggagcgctaccgccagcgctcgccctccccggcgcccgcgcccgccccggccgccgctgctggtccgcccacgcgcaagaagtccaggcgggaacgcaagcgcagcggcgaggccaaggaggccgcctcgtcctcgtcgggcacccagccagcgccgcccgccccggcctcgccctgggactccaagaagcaccgctcgcgggaccgcaagcccggctcccacgcctcgtcgtccgcccgccgccgctcccgctcccgctcccgctcccgctccacccgccgccgctcgcgcagcaccgaccgccgccgcgggggcagccgcaggtcgcggtcccgggagaagcggcgacggcggcggcgctccgcctccccgcccccggccacttcctcatcgtcgtcctcgaggcgcgagcggcaccgcgggaaacaccgggacggtggcggcagcaagaagaagaagaagcggtcgcggtcccggggtgagaagcggtctggggatggcagcgagaaggccccggcgcccgccccgccgccctctggctccacctcgtgtggtgaccgcgacagccgccgccggggggccgtgccaccctccatccaggacctcacggaccacgacctcttcgccatcaagcggaccatcacggtgggccggcttgacaagtccgacccccgaggaccctctcctgctccggcctcctcacctaagcgggaggtcctgtacgactccgagggactgagcggcgaggagcggggcggcaagagcagccagaaggatcggcgccgctcgggggccgcctcctcctcctcctcttcccgggagaaggggtctcgtcggaaggcgctggacgggggtgaccgggatcgggacagggacagagatagggacagggacaggtcatccaagaaggcccggccccccaaggagtcggcgccttcctcagggcccccgccaaagccaccagtcagcagcggctcaggctcttcatcctcgtcgtcctcctgttcttcccggaaggtgaagctgcagtccaaggtggcggtgctgatccgcgagggtgtcagcagcaccaccccggccaaggatgccgcgtcagccggcctgggctccattggcgtcaaattcagccgtgaccgcgagagtcgctcccccttcctcaaacctgacgagcgggcccccactgagatggccaaagcagctccgggcagcaccaagcccaaaaagaccaaggtcaaggccaaggcaggggccaagaaaaccaaggggaccaagggaaagaccaagccatccaagaccaggaaaaaggtccgcagtggaggtggcagcgggggcagtggtggccaggtgtcgctgaagaagtccaaggcggatagctgcagccaggcggcaggcaccaagggggcggaggagacttcctggtccggggaggagcgggcagccaaggttcctagcaccccgccccccaaggcagccccaccaccccctgccctcactccggactcgcagaccgtggacagcagctgcaagacacctgaggtctccttcctgcccgaggaggccactgaggaggctggggtccgaggtggggcggaggaggaggaggaggaagaagaagaggaggaggaagaggaagaggaggaggagcagcagcctgctaccaccacggccaccagcactgctgcagccgccccaagcactgcccccagcgcggggtccacagccggtgactcgggggcggaggacgggccagcttcccgtgtctcccagctgcccacgttgcccccgcccatgccctggaatctgccagctggtgtggactgcaccaccagcggcgtcctggccttgactgcacttctcttcaagatggaagaagccaacctggcgagccgagcgaaggcccaggagctgatccaggccaccaaccagatcctcagccacagaaagccaccctcaagtctggggatgaccccagctcctgtgcccacctctttgggtctgccccctggcccctccagctacctgcttcctggcagcctccctctggggggctgcggttcgaccccccccacccccaccgggctggctgccacgtctgacaagagagagggcagcagcagctctgagggccgtggggacacagataagtatctgaagaagctgcacacgcaggagcgggcggtggaggaggtgaagctggccatcaagccatactatcagaagaaggacatcaccaaggaggagtacaaggacatcctgaggaaggccgtccacaagatctgccacagcaaaagtggggaaatcaacccagtgaaggtgagcaacctggtgcgggcctacgtccagcgctaccgctacttccgcaagcacggtcgcaagccaggggaccccccagggcccccacggccgcccaaggagccagggcccccagacaagggtggcccgggcctgcccctgccccctctctgagagccctggccagctcttcgcccctcacctctttgaaactctggacgtatttatggctccacctccccacctccctcccccgtcagtgggatgactgggggagggttgctgcagggaagaggagagccccctgccctgccctgccccgtgtccacctcccttgcccccaagcctgtccccagtgcccctcccttctgtttgtgcccctctccccaatttcattaaagatttcatgaaacatt

SEQ ID NO: 5545 - protein, 1337 aa, Homo sapiens
MSILYFHPFSRDLHSKLSPLDPQVTMEEEDESRGKTEESGEDRGDGPPDRDPTLSPSAFILRAIQQAVGSSLQGDLPNDKDGSRCHGLRWRRCRSPRSEPRSQESGGTDTATVLDMATDSFLAGLVSVLDPPDTWVPSRLDLRPGESEDMLELVAEVRIGDRDPIPLPVPSLLPRLRAWRTGKTVSPQSNSSRPTCARHLTLGTGDGGPAPPPAPSSASSSPSPSPSSSSPSPPPPPPPPAPPAPPAPRFDIYDPFHPTDEAYSPPPAPEQKYDPFEPTGSNPSSSAGTPSPEEEEEEEEEEEEEEEDEEEEEGLSQSISRISETLAGIYDDNSLSQDFPGDESPRPDAQPTQPTPAPGTPPQVDSTRADGAMRRRVFVVGTEAEACREGKVSVEVVTAGGAALPPPLLPPGDSEIEEGEIVQPEEEPRLALSLFRPGGRAARPTPAASATPTAQPLPQPPAPRAPEGDDFLSLHAESDGEGALQVDLGEPAPAPPAADSRWGGLDLRRKILTQRRERYRQRSPSPAPAPAPAAAAGPPTRKKSRRERKRSGEAKEAASSSSGTQPAPPAPASPWDSKKHRSRDRKPGSHASSSARRRSRSRSRSRSTRRRSRSTDRRRGGSRRSRSREKRRRRRRSASPPPATSSSSSSRRERHRGKHRDGGGSKKKKKRSRSRGEKRSGDGSEKAPAPAPPPSGSTSCGDRDSRRRGAVPPSIQDLTDHDLFAIKRTITVGRLDKSDPRGPSPAPASSPKREVLYDSEGLSGEERGGKSSQKDRRRSGAASSSSSSREKGSRRKALDGGDRDRDRDRDRDRDRSSKKARPPKESAPSSGPPPKPPVSSGSGSSSSSSSCSSRKVKLQSKVAVLIREGVSSTTPAKDAASAGLGSIGVKFSRDRESRSPFLKPDERAPTEMAKAAPGSTKPKKTKVKAKAGAKKTKGTKGKTKPSKTRKKVRSGGGSGGSGGQVSLKKSKADSCSQAAGTKGAEETSWSGEERAAKVPSTPPPKAAPPPPALTPDSQTVDSSCKTPEVSFLPEEATEEAGVRGGAEEEEEEEEEEEEEEEEEEQQPATTTATSTAAAAPSTAPSAGSTAGDSGAEDGPASRVSQLPTLPPPMPWNLPAGVDCTTSGVLALTALLFKMEEANLASRAKAQELIQATNQILSHRKPPSSLGMTPAPVPTSLGLPPGPSSYLLPGSLPLGGCGSTPPTPTGLAATSDKREGSSSSEGRGDTDKYLKKLHTQERAVEEVKLAIKPYYQKKDITKEEYKDILRKAVHKICHSKSGEINPVKVSNLVRAYVQRYRYFRKHGRKPGDPPGPPRPPKEPGPPDKGGPGLPLPPL

SEQ ID NO: 5546 - DNA, 1125 bp, Homo sapiens
ggcacgaggaagcgaccgagggactgggagtcgttagtgagagtttcactcttgttgcctaggctggagtgcaatggtgcgatcttggctcatcacgaccttcgcctcccaggttcaagtgattgtcccatttcagcctcccgagtagctgggattacaggatgacgcggcatggcaagaactgcaccgcaggggccgtctacacctaccacgagaagaagaaggacacagcggcctcgggctatgggacccagaacattcgactgagccgggatgccgtgaaggacttcgactgctgttgtctctccctgcagccttgccacgatcctgttgtcaccccagatggctacctgtatgagcgtgaggccatcctggagtacattctgcaccagaagaaggagattgcccggcagatgaaggcctacgagaagcagcggggcacccggcgcgaggagcagaaggagcttcagcgggcggcctcgcaggaccatgtgcggggcttcctggagaaggagtcggctatcgtgagccggcccctcaaccctttcacagccaaggccctctcgggcaccagcccagatgatgtccaacctgggcccagtgtgggtcctccaagtaaggacaaggacaaagtgctgcccagcttctggatcccgtcgctgacgcccgaagccaaggccaccaagctggagaagccgtcccgcacggtgacctgccccatgtcagggaagcccctgcgcatgtcggacctgacgcccgtgcacttcacaccgctagacagctccgtggaccgcgtggggctcatcacccgcagcgagcgctacgtgtgtgccgtgacccgcgacagcctgagcaacgccaccccctgcgctgtgctgcggccctctggggctgtggtcaccctcgaatgcgtggagaagctgattcggaaggacatggtggaccctgtgactggagacaaactcacagaccgcgacatcatcgtgctgcagcggggcggtaccggcttcgcgggctccggagtgaagctgcaagcggagaaatcacggccggtgatgcaggcctgagtgtgtgcgggagaccaaataaaccggcttgggtgcgcaaaaaaaaaaaaaaaaaaaa

SEQ ID NO: 5547 - protein, 301 aa, Homo sapiens
MTRHGKNCTAGAVYTYHEKKKDTAASGYGTQNIRLSRDAVKDFDCCCLSLQPCHDPVVTPDGYLYEREAILEYILHQKKEIARQMKAYEKQRGTRREEQKELQRAASQDHVRGFLEKESAIVSRPLNPFTAKALSGTSPDDVQPGPSVGPPSKDKDKVLPSFWIPSLTPEAKATKLEKPSRTVTCPMSGKPLRMSDLTPVHFTPLDSSVDRVGLITRSERYVCAVTRDSLSNATPCAVLRPSGAVVTLECVEKLIRKDMVDPVTGDKLTDRDIIVLQRGGTGFAGSGVKLQAEKSRPVMQA

SEQ ID NO: 5548 - DNA, 1796 bp, Homo sapiens
gaaggatattaaagagcacctgcaggaattttttaaggggatgccgggggaagggcttgaaggaggaactaaggaggcttccagaagattttgattaacagcgagcgctagggaaggccacggggatacagaggggtaggaggaggatccagagacctccaagttgtggactccggaggcatcgagttcctttcccagttttgtcaagaattccctgagcggcagacaccctcaaagtaaaaaacgggaaccacagagaaggaaaaagaagaaccacaagcgttttgagaaacaaacaggctgggcctagggcctggggtgtgccctgcaactggggggtggggctggatgttcttggagtcagggagcagcagcctcccacaggatgtgagagaggaactggggtctccagtcacgggagccaggagccggccagggccgcaggcaggaagcggagcgaggctgaagggaacttcgtcctctcagcatgggggtcccgcggcctcagccctgggcgctggggctcctgctctttctccttcctgggagcctgggcgcagaaagccacctctccctcctgtaccaccttaccgcggtgtcctcgcctgccccggggactcctgccttctgggtgtccggctggctgggcccgcagcagtacctgagctacaatagcctgcggggcgaggcggagccctgtggagcttgggtctgggaaaaccaggtgtcctggtattgggagaaagagaccacagatctgaggatcaaggagaagctctttctggaagctttcaaagctttggggggaaaaggtccctacactctgcagggcctgctgggctgtgaactgggccctgacaacacctcggtgcccaccgccaagttcgccctgaacggcgaggagttcatgaatttcgacctcaagcagggcacctggggtggggactggcccgaggccctggctatcagtcagcggtggcagcagcaggacaaggcggccaacaaggagctcaccttcctgctattctcctgcccgcaccgcctgcgggagcacctggagaggggccgcggaaacctggagtggaaggagcccccctccatgcgcctgaaggcccgacccagcagccctggcttttccgtgcttacctgcagcgccttctccttctaccctccggagctgcaacttcggttcctgcggaatgggctggccgctggcaccggccagggtgacttcggccccaacagtgacggatccttccacgcctcgtcgtcactaacagtcaaaagtggcgatgagcaccactactgctgcattgtgcagcacgcggggctggcgcagcccctcagggtggagctggaatctccagccaagtcctccgtgctcgtggtgggaatcgtcatcggtgtcttgctactcacggcagcggctgtaggaggagctctgttgtggagaaggatgaggagtgggctgccagccccttggatctcccttcgtggagacgacaccggggtcctcctgcccaccccaggggaggcccaggatgctgatttgaaggatgtaaatgtgattccagccaccgcctgaccatccgccattccgactgctaaaagcgaatgtagtcaggcccctttcatgctgtgagacctcctggaacactggcatctctgagcctccagaaggggttctgggcctagttgtcctccctctggagccccgtcctgtggtctgcctcagtttcccctcctaatacatatggctgttttccacctcgataatataacacgagtttgggccc

SEQ ID NO: 5549 - DNA, 586 bp, Rattus norvegicus
tttctttttttcaggcggccgggaagatggcggacattcagactgagcgtgcctaccaaaagcagccgaccatctttcaaaacaagaagagggtcctgctgggagaaactggcaaggagaagctcccgcggtactacaagaacatcggtctgggcttcaagacacccaaggaggctattgagggcacctacattgacaagaaatgccccttcactggtaatgtgtccattcgagggcggatcctctctggcgtggtgaccaagatgaagatgcagaggaccattgtcatccgccgagactatctgcactacatccgcaagtacaaccgcttcgagaagcgccacaagaacatgtctgtacacctgtccccctgcttcagggacgtccagatcggtgacatcgtcacagtgggcgagtgccggcctctgagcaagacagtgcgcttcaacgtgctcaaggtcaccaaggctgccggcaccaagaagcagttccagaagttctgaggctggacatcggcccgctccccacaatgaaataaagttattttctcattcccaggccaaaaaaaaaaaaaaaaaaaaaaaaa

SEQ ID NO: 5550 - DNA, 1142 bp, Homo sapiens
cttttccaagcggctgccgaagatggcggaggtgcaggtcctggtgcttgatggtcgaggccatctcctgggccgcctggcggccatcgtggctaaacaggtactgctgggccggaaggtggtggtcgtacgctgtgaaggcatcaacatttctggcaatttctacagaaacaagttgaagtacctggctttcctccgcaagcggatgaacaccaacccttcccgaggcccctaccacttccgggcccccagccgcatcttctggcggaccgtgcgaggtatgctgccccacaaaaccaagcgaggccaggccgctctggaccgtctcaaggtgtttgacggcatcccaccgccctacgacaagaaaaagcggatggtggttcctgctgccctcaaggtcgtgcgtctgaagcctacaagaaagtttgcctatctggggcgcctggctcacgaggttggctggaagtaccaggcagtgacagccaccctggaggagaagaggaaagagaaagccaagatccactaccggaagaagaaacagctcatgaggctacggaaacaggccgagaagaacgtggagaagaaaattgacaaatacacagaggtcctcaagacccacggactcctggtctgagcccaataaagactgttaattcctcatgcgttgcctgcccttcctccattgttgccctggaatgtacgggacccaggggcagcagcagtccaggtgccacaggcagccctgggacataggaagctgggagcaaggaaagggtcttagtcactgcctcccgaagttgcttgaaagcactcggagaattgtgcaggtgtcatttatctatgaccaataggaagagcaaccagttactatgagtgaaagggagccagaagactgattggagggccctatcttgtgagtggggcatctgttggactttccacctggtcatatactctgcagctgttagaatgtgcaagcacttggggacagcatgagcttgctgttgtacacagggtatttctagaagcagaaatagactgggaagatgcacaaccaaggggttacaggcatcgcccatgctcctcacctgtattttgtaatcagaaataaattgcttttaaagaaaaaaaaaaaaaaaaaa

SEQ ID NO: 5551 - protein, 203 aa, Homo sapiens [sequence omitted]

SEQ ID NO: 5552 - DNA, 2895 bp, Homo sapiens
cgcagtcttcgcggaaagcgttcggggtaggcgatggctgcgacgcgtgcagggccccgcgcccgcgagatcttcacctcgctggagtacggaccggtgccggagagccacgcatgcgcactggcctggctggacacccaggaccggtgcttgggccactatgtgaatgggaagtggttaaagcctgaacacagaaattcagtgccttgccaggatcccatcacaggctggccgaggtgatccagaagcaccagcggctgctgtggaccctggaatccctggtgactgggcgggctgttcgagaggttcgagacggggacgtccagctggcccagcagctgctccactaccatgcaatccaggcatccacccaggaggaggcactggcaggctgggagcccatgggagtaattggcctcatcctgccacccacattctccttccttgagatgatgtggaggatttgccctgccctggctgtgggctgcaccgtggtggccctcgtgcccccggcctccccggcgcccctcctcctggcccagctggcgggggagctgggccccttcccgggaatcctgaatgtcctcagtggccctgcgtccctggtgcccatcctggcctcccagcctggaatccggaaggtggccttctgcggagccccggaggaagggcgtgcccttcgacggagcctggcgggagagtgtgcggagctgggcctggcgctggggacggagtcgctgctgctgctgacggacacggcggacgtagactcggccgtggagggtgtcgtggacgccgcctggtccgaccgcggcccgggtggcctcaggctcctcatccaggagtctgtgtgggatgaagccatgagacggctgcaggagcggatggggcggcttcggagtggccgagggctggatggggccgtggacatgggggcccggggggctgccgcatgtgacctggtccagcgctttgtgcgtgaggcccagagccagggtgcacaggtgttccaggctggtgatgtgccttcggaacgcccattctatcccccaaccttggtctccaacctgcccccagcctccccatgtgcccaggtggaggtgccgtggcctgtggtcgtggcctcccccttccgcacagccaaggaggcactgttggtggccaacgggacgccccgcgggggcagcgccagtgtgtggagcgagaggctggggcaggcgctggagctgggctatgggctccaggtgggcactgtctggatcaacgcccacggcctcagagacccttcggtgcccacaggcggctgcaaggagagtgggtgttcctggcacgggggcccagacgggctgtatgagtatctgcggccctcagggacccctgcccggctgtcctgcctctccaagaacctgaactatgacacctttggcctcgctgttccctcaaccctgccggctgggcctgaaatagggcccagcccagcacccccctatgggctcttcgttgggggccgtttccaggctcctggggcccgaagctccaggcccatccgggattcgtctggcaacctccatggctacgtggctgagggtggagccaaggacatccgaggtgctgtggaggccgctcaccaggctttccctggctgggcgggccagtccccaggagcccgggcagccctgctgtgggccctggcggctgcactggagcgccggaagtctaccctggcctcgaggctggagaggcagggagcggagctcaaggctgcggaggcggaggtggagctgagcgcaagacgacttcgggcgtggggggcccgggtgcaggcccaaggccacaccctgcaggtagccgggctgagaggccctgtgctgcgcctgcgggagccgctgggtgtgctggctgtggtgtgtccggacgagtggcccctgcttgccttcgtgtccctgctggctcccgccctggcctacggcaacactgtggtcatggtgcccagtgcggcctgtcctctgctggccctggaggtctgccaggacatggccaccgtgttcccagcaggcctggccaacgtggtgacaggagaccgggaccatctgacccgctgcctggccttgcaccaagacgtccaggccatgtggtatttcggatcagcccagggttcccagtttgtcgagtgggcctcggcaggaaacctcaaaccggtgtgggcgagcaggggctgcccgcgggcctgggaccaggaggccgagggggcaggcccagagctggggctgcgagtggcgcggaccaaggccctgtggctgcctatgggggactgatgcctgagcgccacctactgcattttggacacctcacaccaaggggagatgcaccccacagacacctgggactttccccttctggttcctgtgtctcccaataaactctctgaccaaccctagctgtgcttctgcgagaagaaagggtgtagcaacttctggcagatatgaggcttttttcttttttttttttttttttgagacaacgtctggctctgtcacccaggctggagcgcagtggcacaatctcggcccactgcagcctcgacctctggggctcaagggatcctcatgcctcagcctcatatgtagctggggccacagacatgcaccaccacacctggctcgaggccattttagttctgaggttgagcagctcaggagccggctccagcacggtgctgtgtttgtgaaacagagaaaggggacccccgaggaccccagacagggccttaggactctcatatcttcttgtcttctccatctggtggctcttgctctctggttttctctaccttttcatggccccagaatccatatgcagtaaaggaactctctggaataaaattaaagtcctcct

SEQ ID NO: 5553 - protein, 637 aa, Homo sapiens
MGVIGLILPPTFSFLEMMWRICPALAVGCTVVALVPPASPAPLLLAQLAGELGPFPGILNVLSGPASLVPILASQPGIRKVAFCGAPEEGRALRRSLAGECAELGLALGTESLLLLTDTADVDSAVEGVVDAAWSDRGPGGLRLLIQESVWDEAMRRLQERMGRLRSGRGLDGAVDMGARGAAACDLVQRFVREAQSQGAQVFQAGDVPSERPFYPPTLVSNLPPASPCAQVEVPWPVVVASPFRTAKEALLVANGTPRGGSASVWSERLGQALELGYGLQVGTVWINAHGLRDPSVPTGGCKESGCSWHGGPDGLYEYLRPSGTPARLSCLSKNLNYDTFGLAVPSTLPAGPEIGPSPAPPYGLFVGGRFQAPGARSSRPIRDSSGNLHGYVAEGGAKDIRGAVEAAHQAFPGWAGQSPGARAALLWALAAALERRKSTLASRLERQGAELKAAEAEVELSARRLRAWGARVQAQGHTLQVAGLRGPVLRLREPLGVLAVVCPDEWPLLAFVSLLAPALAYGNTVVMVPSAACPLLALEVCQDMATVFPAGLANVVTGDRDHLTRCLALHQDVQAMWYFGSAQGSQFVEWASAGNLKPVWASRGCPRAWDQEAEGAGPELGLRVARTKALWLPMGD

SEQ ID NO: 5554 - DNA, 1208 bp, Homo sapiens
acagttcggcacgtaggacggagggtagtgcgtctagagacacatattccccacggatttgacgatggtgttcggtcttgaatggaaatgtagtcttaggccagtcttaggtttttgaacaggatagtaggtatccggagtcgattgagggccagagcaggcactggggttcggatcctgggcaaagtttcccacgttgagggtctcgaggacgcctagatctctttcccagggccatggcgaacccgaagctgctgggaatggggctaagcgaggcggaggcgatcggtgctgattcggcgcgatttgaggagctgctgctgcaggcctcgaaggagctccagcaagcccagacaaccagaccagaatcgacacaaatccagcctcagcctggtttctgcataaagaccaactcctcggaagggaaggttttcatcaacatctgccactccccctctatccctcctcccgccgacgtgaccgaggaggagctgcttcagatgctagaggaggaccaagctgggtttcgcatccccatgagtctgggagagcctcatgcagaactggatgcaaaaggccagggatgtaccgcctacgacgtagctgtcaacagcgacttctaccggaggatgcagaacagcgatttcttgcgggagctcgtgatcaccatcgccagggagggccttgaggacaaatacaacttgcagctgaatccggaatggcgcatgatgaagaaccggccattcatgggctccatctcgcagcagaacatccgctcggagcagcgtcctcggatccaggagctgggggacctgtacacgcccgcccccgggagagctgagtcagggcctgaaaagcctcacctgaacctgtggctggaagcccccgacctcctcttggccgaagttgacctccccaaactggatggagccctggggctgtcgctggagatcggggagaaccgcctggtgatggggggcccccagcagctgtatcatctagacgcttatatcccgctgcagatcaactctcatgagagcaaggcagccttccaccggaagagaaagcaattaatggtggccatgccgcttctgccggtgccttcttgatcagggtgtctccttgtgcttctgagatgtggagaagaggctgctggcttccctaaaagttgaaataaaagatttttgcctttaaaaaaaaaaaaaaaa

SEQ ID NO: 5555 - protein, 290 aa, Homo sapiens
MANPKLLGMGLSEAEAIGADSARFEELLLQASKELQQAQTTRPESTQIQPQPGFCIKTNSSEGKVFINICHSPSIPPPADVTEEELLQMLEEDQAGFRIPMSLGEPHAELDAKGQGCTAYDVAVNSDFYRRMQNSDFLRELVITIAREGLEDKYNLQLNPEWRMMKNRPFMGSISQQNIRSEQRPRIQELGDLYTPAPGRAESGPEKPHLNLWLEAPDLLLAEVDLPKLDGALGLSLEIGENRLVMGGPQQLYHLDAYIPLQINSHESKAAFHRKRKQLMVAMPLLPVPS

SEQ ID NO: 5556 - DNA, 2220 bp, Homo sapiens
cccacttttcccaaacaaagctcccggcaactttctccctcgcagcgccccgcccgcccgcggctccccagccccaggccgggaggcccagatgggggaaccccgggctggggccgccctggacgatggcagcggctggacgggcagtgaggaaggcagtgaggagggtaccggcggcagtgagggggctgggggtgacgggggcccggatgcagagggggtgtggagcccagacattgagcagagcttccaggaggccctggccatctatccaccctgcggccgccggaaaataattttgtctgatgaaggcaagatgtatggtcggaatgaactgatcgcccgctacatcaagctgagaacggggaagacccgaactcgaaaacaggtttctagtcacatccaggttttggcccgaaggaaatcaagggaaatccagtccaagttgaaggaccaggtttccaaggacaaggctttccagacaatggcaaccatgtcctctgcccagctcatctccgcgccttctctgcaggccaaactgggtcccactggtcctcaggcctctgagcttttccagttttggtctggaggatctgggcccccctggaatgttccagatgtgaagccattctcacagacaccgttcaccttgtcactgactcccccatctactgacctcccagggtacgagcccccccaagccctctcacccctgcccccacctaccccatcgcccccagcctggcaggctcggggcctgggcaccgcccggttgcagctggtagagttctcagccttcgtggaaccgccagatgcagttgattcttaccagaggcacctgttcgtgcacatcagccagcactgccccagccccggagcgccgccgctcgagagtgtggacgtccggcagatctacgacaaattccctgagaaaaagggtggcctccgagagctatatgatcgtggccccccccatgccttcttcctggtcaagttctgggcggacctgaactggggcccaagtggtgaggaggcaggggccggtggcagcatcagcagtggtggcttctacggagtgagcagccagtatgagagcctggaacacatgaccctcacctgttcctccaaggtctgctcttttggcaagcaggtggtggagaaggtggagacggaacgggcccagctggaggacggcagatttgtgtaccgcctgctgcgctcgcccatgtgcgagtacctggtgaatttcttgcacaagttgcggcagctgcctgagcgatacatgatgaacagcgtcctggaaaacttcaccatcctccaggtggtgacaaacagagacacccaggaactgctgctctgcaccgcctatgtcttcgaggtctccaccagcgagcgtggggcccagcatcacatttaccgcctggtcagggactgaagggggaccccaaaactggctcaccccccagaacaccctcctcccagggagggtcctccagctcacctcatgcttcttatttggggagagggctgtgatgtaaaggggttgacctcagaggcctaagcaactggggccatcccccccattagaggggcccccaaaacttggttggagagctgaacaggctgggactgaggaaaggataaaccccgatattgggacctcacagtgggtgtctgaaaggacagatcactccggagtatcagggattgtggggacaggagtgagacaaccccccaggtacagcactggcttttcttttcagcccctgacaggccacccccactcctctgcatgtcttggagagcgctagttacacattggcttgtcccctttactttttcccagccacccctccccctgaaatttctgcccctctctaccaccctcactccatgacctgtgagatcacaaagtgaagatgaaccctttctgtgcaggagcagagccaggtgggccctggacattttttttttttttaatataacgagatatttataagtgggtgctagggtcttgactttatctccgctgcacaagcagtgtgttgaactttctaatctcatccctctcctaagtgagccctgagctagacggtttccttcctcccctctcaaagtttgtttgtttgtgttctgacagaggataaagctattttaccaaaaaaaaaaaaaaaaaaaaaaaaaaaaaaaaaaaaaaaaaaaaaaaaaaaaaaaaaaaaa

SEQ ID NO: 5557 - protein, 447 aa, Homo sapiens
MGEPRAGAALDDGSGWTGSEEGSEEGTGGSEGAGGDGGPDAEGVWSPDIEQSFQEALAIYPPCGRRKIILSDEGKMYGRNELIARYIKLRTGKTRTRKQVSSHIQVLARRKSREIQSKLKDQVSKDKAFQTMATMSSAQLISAPSLQAKLGPTGPQASELFQFWSGGSGPPWNVPDVKPFSQTPFTLSLTPPSTDLPGYEPPQALSPLPPPTPSPPAWQARGLGTARLQLVEFSAFVEPPDAVDSYQRHLFVHISQHCPSPGAPPLESVDVRQIYDKFPEKKGGLRELYDRGPPHAFFLVKFWADLNWGPSGEEAGAGGSISSGGFYGVSSQYESLEHMTLTCSSKVCSFGKQVVEKVETERAQLEDGRFVYRLLRSPMCEYLVNFLHKLRQLPERYMMNSVLENFTILQVVTNRDTQELLLCTAYVFEVSTSERGAQHHIYRLVRD

SEQ ID NO: 5558 - DNA, 1488 bp, Homo sapiens
gttggtgagcatcatggcaaccgttacagccacaaccaaagtcccggagatccgtgatgtaacaaggattgagcgaatcggtgcccactcccacatccggggactggggctggacgatgccttggagcctcggcaggcttcgcaaggcatggtgggtcagctggcggcacggcgggcggctggcgtggtgctggagatgatccgggaagggaagattgccggtcgggcagtccttattgctggccagccgggcacggggaagacggccatcgccatgggcatggcgcaggccctgggccctgacacgccattcacagccatcgccggcagtgaaatcttctccctggagatgagcaagaccgaggcgctgacgcaggccttccggcggtccatcggcgttcgcatcaaggaggagacggagatcatcgaaggggaggtggtggagatccagattgatcgaccagcaacagggacgggctccaaggtgggcaaactgaccctcaagaccacagagatggagaccatctacgacctgggcaccaagatgattgagtccctgaccaaggacaaggtccaggccggggacgtgatcaccatcgacaaggcgacgggcaagatctccaagctgggccgctccttcacacgcgcccgcgactacgacgctatgggctcccagaccaagttcgtgcagtgcccagatggggagctccagaaacgcaaggaggtggtgcacaccgtgtccctgcacgagatcgacgtcatcaactctcgcacccagggcttcctggcgctcttctcaggtgacacaggggagatcaagtcagaagtccgtgagcagatcaatgccaaggtggctgagtggcgcgaggagggcaaggcggagatcatccctggagtgctgttcatcgacgaggtccacatgctggacatcgagagcttctccttcctcaaccgggccctggagagtgacatggcgcctgtcctgatcatggccaccaaccgtggcatcacgcgaatccggggcaccagctaccagagccctcacggcatccccatagacctgctggaccggctgcttatcgtctccaccaccccctacagcgagaaagacacgaagcagatcctccgcatccggtgcgaggaagaagatgtggagatgagtgaggacgcctacacggtgctgacccgcatcgggctggagacgtcactgcgctacgccatccagctcatcacagctgccagcttggtgtgccggaaacgcaagggtacagaagtgcaggtggatgacatcaagcgggtctactcactcttcctggacgagtcccgctccacgcagtacatgaaggagtaccaggacgccttcctcttcaacgaactcaaaggcgagaccatggacacctcctgagttggatgtcatcccccgaccccaccctgttttccaccagagttctgacactgtgactctgtataaaatggttgggaagctgc

SEQ ID NO: 5559 - protein, 463 aa, Homo sapiens
MATVTATTKVPEIRDVTRIERIGAHSHIRGLGLDDALEPRQASQGMVGQLAARRAAGVVLEMIREGKIAGRAVLIAGQPGTGKTAIAMGMAQALGPDTPFTAIAGSEIFSLEMSKTEALTQAFRRSIGVRIKEETEIIEGEVVEIQIDRPATGTGSKVGKLTLKTTEMETIYDLGTKMIESLTKDKVQAGDVITIDKATGKISKLGRSFTRARDYDAMGSQTKFVQCPDGELQKRKEVVHTVSLHEIDVINSRTQGFLALFSGDTGEIKSEVREQINAKVAEWREEGKAEIIPGVLFIDEVHMLDIESFSFLNRALESDMAPVLIMATNRGITRIRGTSYQSPHGIPIDLLDRLLIVSTTPYSEKDTKQILRIRCEEEDVEMSEDAYTVLTRIGLETSLRYAIQLITAASLVCRKRKGTEVQVDDIKRVYSLFLDESRSTQYMKEYQDAFLFNELKGETMDTS

SEQ ID NO: 5560 - DNA, 3533 bp, Homo sapiens
cgcttcggggcaggggtgcggtcttgcaataggaagccgagcgtcttgcaagcttcccgtcgggcaccagctactcggccccgcaccctacctggtgcattccctagacacctccggggtccctacctggagatccccggagccccccttcctgcgccagccatgcctttaaaccgcactttgtccatgtcctcactgccaggactggaggactgggaggatgaattcgacctggagaacgcagtgctcttcgaagtggcctgggaggtggctaacaaggtgggtggcatctacacggtgctgcagacgaaggcgaaggtgacaggggacgaatggggcgacaactacttcctggtggggccgtacacggagcagggcgtgaggacccaggtggaactgctggaggcccccaccccggccctgaagaggacactggattccatgaacagcaagggctgcaaggtgtatttcgggcgctggctgatcgagggaggccctctggtggtgctcctggacgtgggtgcctcagcttgggccctggagcgctggaagggagagctctgggatacctgcaacatcggagtgccgtggtacgaccgcgaggccaacgacgctgtcctctttggctttctgaccacctggttcctgggtgagttcctggcacagagtgaggagaagccacatgtggttgctcacttccatgagtggttggcaggcgttggactctgcctgtgtcgtgcccggcgactgcctgtagcaaccatcttcaccacccatgccacgctgctggggcgctacctgtgtgccggtgccgtggacttctacaacaacctggagaacttcaacgtggacaaggaagcaggggagaggcagatctaccaccgatactgcatggaaagggcggcagcccactgcgctcacgtcttcactactgtgtcccagatcaccgccatcgaggcacagcacttgctcaagaggaaaccagatattgtgacccccaatgggctgaatgtgaagaagttttctgccatgcatgagttccagaacctccatgctcagagcaaggctcgaatccaggagtttgtgcggggccatttttatgggcatctggacttcaacttggacaagaccttatacttctttatcgccggccgctatgagttctccaacaagggtgctgacgtcttcctggaggcattggctcggctcaactatctgctcagagtgaacggcagcgagcagacagtggttgccttcttcatcatgccagcgcggaccaacaatttcaacgtggaaaccctcaaaggccaagctgtgcgcaaacagctttgggacacggccaacacggtgaaggaaaagttcgggaggaagctttatgaatccttactggttgggagccttcccgacatgaacaagatgctggataaggaagacttcactatgatgaagagagccatctttgcaacgcagcggcagtctttcccccctgtgtgcacccacaatatgctggatgactcctcagaccccatcctgaccaccatccgccgaatcggcctcttcaatagcagtgccgacagggtgaaggtgattttccacccggagttcctctcctccacaagccccctgctccctgtggactatgaggagtttgtccgtggctgtcaccttggagtcttcccctcctactatgagccttggggctacacaccggctgagtgcacggttatgggaatccccagtatctccaccaatctctccggcttcggctgcttcatggaggaacacatcgcagacccctcagcttacggtatctacattcttgaccggcggttccgcagcctggatgattcctgctcgcagctcacctccttcctctacagtttctgtcagcagagccggcggcagcgtatcatccagcggaaccgcacggagcgcctctccgaccttctggactggaaatacctaggccggtactatatgtctgcgcgccacatggcgctgtccaaggcctttccagagcacttcacctacgagcccaacgaggcggatgcaggcccaggggtaccgctacccacggccagcctcggtgccaccgtcgccctcgctgtcacgacactccagcccgcaccagagtgaggacgaggaggatccccggaacgggccgctggaggaagacggcgagcgctacgatgaggacgaggaggccgccaaggaccggcgcaacatccgtgcaccagagtggccgcgccgagcgtcctgcacctcctccaccagcggcagcaagcgcaactctgtggacacggccacctccagctcactcagcaccccgagcgagcccctcagccccaccagctccctgggcgaggagcgtaactaagtccgccccaccacactccccgcctgtcctgcctctctgctccagagagaggatgcagaggggtgctgctcctaaacccccgctccagatctgcactgggtgtggccccgcagtgcccccacccagtccgccaaacactccaccccctccagctccagtttccaagttcctgcactccagaatccacaaagccgtgcctttctctggctccagaatatgcataatcagcgccctggagtcccctgggcctggaccgcttcccagaggccaggaatctgccattactctgcggtggtgccagaggttttaggaaacctggcatggtgctttcaggtctggggcttttagagccccccgtgtggcttacaaattctacagcatacagagcaggccacgctcaggcccggcatgcgggccaccaagttctggaaaccacgtggtgtccctgcgaatggggcgatcaagtccagagccggggcactttcagagtttgaaggtaactgagagcagatggtcctccatttcaactccagaagtggggctctgggagggatgttctagccctccctggcatgtcagagccaggctctgcctggaggatccctccatccggctcctgtcatcccctacactttggccaagcaagaggtggtagaaccacttggctgctcattccttctggaggacacacagtctcagtccagatgccttcctgtctttctggccctttctggaccagatcctactcttcctttctaaatctgagatctccctccagggaatccgcctgcagaggacagagctggctgtcttcccccacccctaacctggcttattcccaactgctctgcccactgtgaaaccactaggttctaggtcctggcttctagatctggaaccttaccacgttactgcatactgatccctttcccatgatccagaactgaggtcactgggttctagaacccccacatttacctcgaggctcttccatccccaaactgtgccctgccttcagctttggtgaaagggagggcccctcatgtgtgctgtgctgtgtctgcaccgcttggtttgcagttgagaggggagggcaggaggggtgtgattggagtgtgtccggagatgagatgaaaaaaatacatctatatttaag

SEQ ID NO: 5561 - protein, 657 aa, Homo sapiens
MPLNRTLSMSSLPGLEDWEDEFDLENAVLFEVAWEVANKVGGIYTVLQTKAKVTGDEWGDNYFLVGPYTEQGVRTQVELLEAPTPALKRTLDSMNSKGCKVYFGRWLIEGGPLVVLLDVGASAWALERWKGELWDTCNIGVPWYDREANDAVLFGFLTTWFLGEFLAQSEEKPHVVAHFHEWLAGVGLCLCRARRLPVATIFTTHATLLGRYLCAGAVDFYNNLENFNVDKEAGERQIYHRYCMERAAAHCAHVFTTVSQITAIEAQHLLKRKPDIVTPNGLNVKKFSAMHEFQNLHAQSKARIQEFVRGHFYGHLDFNLDKTLYFFIAGRYEFSNKGADVFLEALARLNYLLRVNGSEQTVVAFFIMPARTNNFNVETLKGQAVRKQLWDTANTVKEKFGRKLYESLLVGSLPDMNKMLDKEDFTMMKRAIFATQRQSFPPVCTHNMLDDSSDPILTTIRRIGLFNSSADRVKVIFHPEFLSSTSPLLPVDYEEFVRGCHLGVFPSYYEPWGYTPAECTVMGIPSISTNLSGFGCFMEEHIADPSAYGIYILDRRFRSLDDSCSQLTSFLYSFCQQSRRQRIIQRNRTERLSDLLDWKYLGRYYMSARHMALSKAFPEHFTYEPNEADAGPGVPLPTASLGATVALAVTTLQPAPE

SEQ ID NO: 5562 - DNA, 878 bp, Homo sapiens
gtcccgcgggtctgtctcttgcttcaacagtgtttggacggaacagatccggggactctcttccagcctccgaccgccctccgatttcctctccgcttgcaacctccgggaccatcttctcggccatctcctgcttctgggacctgccagcaccgtttttgtggttagctccttcttgccaaccaaccatgagctcccagattcgtcagaattattccaccgacgtggaggcagccgtcaacagcctggtcaatttgtacctgcaggcctcctacacctacctctctctgggcttctatttcgaccgcgatgatgtggctctggaaggcgtgagccacttcttccgcgaattggccgaggagaagcgcgagggctacgagcgtctcctgaagatgcaaaaccagcgtggcggccgcgctctcttccaggacatcaagaagccagctgaagatgagtggggtaaaaccccagacgccatgaaagctgccatggccctggagaaaaagctgaaccaggcccttttggatcttcatgccctgggttctgcccgcacggacccccatctctgtgacttcctggagactcacttcctagatgaggaagtgaagcttatcaagaagatgggtgaccacctgaccaacctccacaggctgggtggcccggaggctgggctgggcgagtatctcttcgaaaggctcactctcaagcacgactaagagccttctgagcccagcgacttctgaagggccccttgcaaagtaatagggcttctgcctaagcctctccctccagccaataggcagctttcttaactatcctaacaagccttggaccaaatggaaataaagctttttgatgcaaaaaaaaaaaaaaaaaaa

SEQ ID NO: 5563 - protein, 175 aa, Homo sapiens
MSSQIRQNYSTDVEAAVNSLVNLYLQASYTYLSLGFYFDRDDVALEGVSHFFRELAEEKREGYERLLKMQNQRGGRALFQDIKKPAEDEWGKTPDAMKAAMALEKKLNQALLDLHALGSARTDPHLCDFLETHFLDEEVKLIKKMGDHLTNLHRLGGPEAGLGEYLFERLTLKHD

SEQ ID NO: 5564 - DNA, 874 bp, Homo sapiens
gctgcggccgcccgcgcggacccggcgagaggcggcggcgggagcggcggtgatggacgggtccggggagcagcccagaggcggggggcccaccagctctgagcagatcatgaagacaggggcccttttgcttcagggtttcatccaggatcgagcagggcgaatggggggggaggcacccgagctggccctggacccggtgcctcaggatgcgtccaccaagaagctgagcgagtgtctcaagcgcatcggggacgaactggacagtaacatggagctgcagaggatgattgccgccgtggacacagactccccccgagaggtctttttccgagtggcagctgacatgttttctgacggcaacttcaactggggccgggttgtcgcccttttctactttgccagcaaactggtgctcaaggccctgtgcaccaaggtgccggaactgatcagaaccatcatgggctggacattggacttcctccgggagcggctgttgggctggatccaagaccagggtggttgggtgagactcctcaagcctcctcacccccaccaccgcgccctcaccaccgcccctgccccaccgtccctgccccccgccactcctctgggaccctgggccttctggagcaggtcacagtggtgccctctccccatcttcagatcatcagatgtggtctataatgcgttttccttacgtgtctgatcaatccccgattcatctaccctgctgacctcccagtgacccctgacctcactgtgaccttgacttgattagtgccttctgccctccctggagcctccactgcctctggaattgctcaagttcattgatgaccctctgaccctagctctttcctttttttttttt

SEQ ID NO: 5565 - protein, 218 aa, Homo sapiens
MDGSGEQPRGGGPTSSEQIMKTGALLLQGFIQDRAGRMGGEAPELALDPVPQDASTKKLSECLKRIGDELDSNMELQRMIAAVDTDSPREVFFRVAADMFSDGNFNWGRVVALFYFASKLVLKALCTKVPELIRTIMGWTLDFLRERLLGWIQDQGGWVRLLKPPHPHHRALTTAPAPPSLPPATPLGPWAFWSRSQWCPLPIFRSSDVVYNAFSLRV

SEQ ID NO: 5566 - DNA, 2311 bp, Homo sapiens
ggcacgaggggagagaccacactgccatgcctccctctgggccccgaggaaccctccttctgttgccgctgctgctgctgctcctgcttcgcgccgtgctggctgtccccctggagcgaggggcgcccaacaaggaggagacccctgcgactgagagtcccgacacaggcctgtactaccaccggtacctccaggaggtcatcgatgtactggagacggatgggcatttccgagagaagctgcaggctgccaatgcggaggacatcaagagcgggaagctgagccgagagctggactttgtcagccaccacgtccgcaccaagctggatgagctcaagcgacaggaggtgtcacggctgcggatgctgctcaaggccaagatggacgccgagcaggatcccaatgtacaggtggatcatctgaatctcctgaaacagtttgaacacctggaccctcagaaccagcatacattcgaggcccgcgacctggagctgctgatccagacggccacccgggaccttgcccagtacgacgcagcccatcatgaagagttcaagcgctacgagatgcttaaggaacacgagagacggcgttatctggagtcactgggagaggagcagagaaaggaggcggagaggaagctggaagagcaacagcgccggcaccgcgagcaccctaaagtcaacgtgcctggcagccaagcccagttgaaggaggtgtgggaggagctggatggactggaccccaacaggtttaaccccaagaccttcttcatactgcatgatatcaacagtgatggtgtcctggatgagcaggagctggaggcactcttcaccaaggagctggagaaagtgtacgacccaaagaatgaggaggacgacatgcgggagatggaggaggagcgactgcgcatgcgggagcatgtgatgaagaatgtggacaccaaccaggaccgcctcgtgaccctggaggagttcctcgcatccactcagaggaaggagtttggggacaccggggagggctgggagacagtggagatgcaccctgcctacaccgaggaagagctgaggcgctttgaagaggagctggctgcccgggaggcagagctgaatgccaaggcccagcgcctcagccaggagacagaggctctagggcggtcccagggccgcctggaggcccagaagagagagctgcagcaggctgtgctgcacatggagcagcggaagcagcagcagcagcagcagcaaggccacaaggccccggctgcccaccctgaggggcagctcaagttccacccagacacagacgatgtacctgtcccagctccagccggtgaccagaaggaggtggacacttcagaaaagaaacttctcgagcggctccctgaggttgaggtgccccagcatctgtgatcctccgggaccccagccctcaggattcctgatgctccaaggcgactgatgggcgctggatgaagtggcacagtcagcttccctgggggccggtgtcatgttgggctcctggggcgggggcacggcctggcatttcacgcattgctgccaccccaggtccacctgtctccactttcacagcctccaagtctgtggctcttcccttctgtcctccgaggggcttgccttctctcgtgtccagtgaggtgctcagtgatcggcttaacttagagaagcccgccccctccccttctccgtctgtcccaagagggtctgctctgagcctgcgttcctaggtggctcggcctcagctgcctgggttgtggccgccctagcatcctgtatgcccacagctactggaatccccgctgctgctccgggccaagcttctggttgattaatgagggcatggggtggtccctcaagaccttcccctaccttttgtggaaccagtgatgcctcaaagacagtgtcccctccacagctgggtgccaggggcaggggatcctcagtatagccggtgaaccctgataccaggagcctgggcctccctgaacccctggcttccagccatctcatcgccagcctcctcctggacctcttggcccccagccccttccccacacagccccagaagggtcccagagctgaccccactccaggacctaggcccagcccctcagcctcatctggagcccctgaagaccagtcccacccacctttctggcctcatctgacactgctccgcatcctgctgtgtgtcctgttccatgttccggttccatccaaatacactttctggaacaaaaaaaaaaaaaaaaaaaaaaaaaaaaaaaaaaaaaaaaaaaaaaaaaaaaaaa

SEQ ID NO: 5567 - protein, 461 aa, Homo sapiens
MPPSGPRGTLLLLPLLLLLLLRAVLAVPLERGAPNKEETPATESPDTGLYYHRYLQEVIDVLETDGHFREKLQAANAEDIKSGKLSRELDFVSHHVRTKLDELKRQEVSRLRMLLKAKMDAEQDPNVQVDHLNLLKQFEHLDPQNQHTFEARDLELLIQTATRDLAQYDAAHHEEFKRYEMLKEHERRRYLESLGEEQRKEAERKLEEQQRRHREHPKVNVPGSQAQLKEVWEELDGLDPNRFNPKTFFILHDINSDGVLDEQELEALFTKELEKVYDPKNEEDDMREMEEERLRMREHVMKNVDTNQDRLVTLEEFLASTQRKEFGDTGEGWETVEMHPAYTEEELRRFEEELAAREAELNAKAQRLSQETEALGRSQGRLEAQKRELQQAVLHMEQRKQQQQQQQGHKAPAAHPEGQLKFHPDTDDVPVPAPAGDQKEVDTSEKKLLERLPEVEVPQHL

SEQ ID NO: 5568 - DNA, 1546 bp, Homo sapiens
atggccgcagccgctctggggcagatctgggcacgaaagcttctctctgtcccttggcttctgtgtggtcccagaagatatgcctcctccagtttcaaggctgcagacctgcagctggaaatgacacagaagcctcataagaagcctggccccggcgagcccctggtgtttgggaagacatttaccgaccacatgctgatggtggaatggaatgacaagggctggggccagccccgaatccagcccttccagaacctcacgctgcacccagcctcctccagcctccactactccctgcagctgtttgagggcatgaaggcgttcaaaggcaaagaccagcaggtgcgcctcttccgcccctggctcaacatggaccggatgctgcgctcagccatgcgcctgtgcctgccgagtttcgacaagctggagttgctggagtgcatccgccggctcatcgaagtggacaaggactgggtccccgatgccgccggcaccagcctctatgtgcggcctgtgctcattgggaacgagccctcgctgggtgtcagccagcccaggcgcgcgctcctgttcgtcattctctgcccagtgggtgcctacttccctggaggctccgtgaccccggtctccctcctggccgacccagccttcatccgggcctgggtgggcggggtcggcaactacaagttaggtgggaattatgggcccaccgtgttagtgcaacaggaggcactcaagcggggctgtgaacaggtcctctggctgtatgggcccgaccaccagctcaccgaggtgggaaccatgaacatctttgtctactggacccacgaagatggggtgctggagctggtgacgcccccgctgaatggtgttatcctgcctggagtggtcagacagagtctactggacatggctcagacctggggtgagttccgggtggtggagcgcacgatcaccatgaagcagttgctgcgggccttggaggagggccgcgtgcgggaagtctttggctcgggcaccgcttgccaggtctgcccagtgcaccgaatcctgtacaaagacaggaacctccatattcccaccatggaaaatgggcctgagctgatcctccgcttccagaaggagctgaaggagatccagtacggaatcagagcccacgagtggatgttcccggtgtgaagctgcaggctgtgctccagatccaccgacccgtagcatctcgtcacgccagcactcgcctccctaccaatgactcacctgaagtgcaatacgaaataaaaggccagcgggcggcgtctgggtctctggcgcccccatgtggttgcgacactcccaaagccgtaagggccgacccaggcatcttggcccccagcccctcgtcgcgggttcaggtccgcccattactccttgtcgtgcggtcaaggatacaccttggccccgattccggatctctccgttctcaggccagacccctggtgctgccgttgatttttttttctctgtctttgctgcaattttgaaataaaatgccaaagaacacaaaaaa

SEQ ID NO: 5569 - protein, 392 aa, Homo sapiens
MAAAALGQIWARKLLSVPWLLCGPRRYASSSFKAADLQLEMTQKPHKKPGPGEPLVFGKTFTDHMLMVEWNDKGWGQPRIQPFQNLTLHPASSSLHYSLQLFEGMKAFKGKDQQVRLFRPWLNMDRMLRSAMRLCLPSFDKLELLECIRRLIEVDKDWVPDAAGTSLYVRPVLIGNEPSLGVSQPRRALLFVILCPVGAYFPGGSVTPVSLLADPAFIRAWVGGVGNYKLGGNYGPTVLVQQEALKRGCEQVLWLYGPDHQLTEVGTMNIFVYWTHEDGVLELVTPPLNGVILPGVVRQSLLDMAQTWGEFRVVERTITMKQLLRALEEGRVREVFGSGTACQVCPVHRILYKDRNLHIPTMENGPELILRFQKELKEIQYGIRAHEWMFPV

SEQ ID NO: 5570 - DNA, 1908 bp, Homo sapiens
tctgctctgagcccccgcccagcccagaaaccccactagcctggggcctgagaacagccacgccactccctcctgagagcccaccgcgccacagcttggaggaagagcctgcggggaactggctgcaggacgctctcttcttgagtgcaggtgctggctctgctgtgaccatgcccgtgacctttgccctcctgctcctcctgggccaggccactgcggacccatgctacgatccacagggccgcccccaattctgcctcccgccagtgacacagctggctgccgtggcggcctcctgccctcaggcctgtgccctgtccccaggaaaccaccttggcgccagggaaacctgcaatggcagcctgactttggccctgggtggccccttcctcctgacatctgtcagcttgcgcttctgtaccccaggacccccagccctcatcctgtctgctgcctgggcctcagggggtccctggaggctgctgtggcacaggcccgcctggcctggggccttagggggccctgaaagggtgaccttccactccacaccaggtcctaaggccactgtggcggccagccacctccgtgtggagtttgggggccaggccgggctagcggcagctgggctgagaggccgctgccagtgtcatggccacgctgcccgctgtgccgcccgtgcccggcccccccgctgccactgccgccaccataccactggcccggggtgcgagagctgccgcccgtcccatcgagactggccctggcggcctgccacgccccggcacccccacccttgcctaccctgctcctgcaaccagcacgcccgacgctgccggttcaactctgagctgttcagactgtcgggcggccggagtgggggtgtttgtgagcggtgccgccaccacacagctgggcggcactgccactactgccaacctgggttctggagggaccctagccagcctatcttcagccgcagggcctgcagagcctgccagtgccaccctattggggcaacaggaggaacctgcaaccagaccagtgggcagtgcacctgcaagttaggggtcacaggcctgacctgcaaccgctgtggccctggctaccagcagagccgctcccccaggatgccctgccagcgaattccagaggcaacaaccacccttgccactactcctggtgcttatagctctgaccctcagtgtcaaaactactgcaatatgtcggacaccagggtacacatgagccttcggaggtactgccagcaggaccatgttctccgcgcgcaggtgctagcgtccgaggcggcgggcccggcatggcagcggctggccgtgcgcgtgctggccgtttacaagcagcgggcgcagcccgtgcgacgcggcgaccaggacgcctgggtgccccgcgccgacctgacctgcggctgcctgcgcctgcagccaggcaccgactacctgctgctgggcagcgccgtgggcgaccccgaccccacgcgcctcatcctcgaccgccacggcctcgcgctgccatggaggccgcgctgggcccggcccctgaagcggctgcagcaggaggagcgcgccggaggctgccgcggcgtgcgggcacccacacccagtcccaggccggagcactagacgtgagatggggctgcctcgagcaccaacaaagtaatttgggagcgactaggagctgagccttctacctcgacggtgcactgcagagagccaatcagacgtcgcagagccccgacgacactatgcttgcgcccacgccgagcaggcgtgcggaacttttagcaaaaggcggcaagcgggacttctggtcccaacatttcctcctttggcctgtggcttattccccgccagtgatctgtttcccccaataaagtctcaaatctttggg

SEQ ID NO: 5571 - DNA, 648 bp, Homo sapiens
ctttccggacctggccgagcaggaggcgccatcatgggagtggacatccgccataacaaggaccgaaaggttcggcgcaaggagcccaagagccaggatatctacctgaggctgttggtcaagttatacaggtttctggccagaagaaccaactccacattcaaccaggttgtgttgaagaggttgtttatgagtcgcaccaaccggccgcctctgtccctttcccggatgatccggaagatgaagcttcctggccgggaaaacaagacggccgtggttgtggggaccataactgatgatgtgcgggttcaggaggtacccaaactgaaggtatgtgcactgcgcgtgaccagccgggcccgcagccgcatcctcagggcagggggcaagatcctcactttcgaccagctggccctggactcccctaagggctgtggcactgtcctgctctccggtcctcgcaagggccgagaggtgtaccggcatttcggcaaggccccaggaaccccgcacagccacaccaaaccctacgtccgctccaagggccggaagttcgagcgtgccagaggccgacgggccagccgaggctacaaaaactaaccctggatcctactctcttattaaaaagatttttgctgacaaaaaaaa

SEQ ID NO: 5572 - protein, 188 aa, Homo sapiens [sequence omitted]

SEQ ID NO: 5573 - DNA, 392 bp, Homo sapiens
ctgcagggccaggcctggccacacttgggctgcttctcctatccctcgtaccagccagccccaggccttctggaactctcagctgcctcatcctgcctgcttttcccttcaacactgcttggagctgtgttttccagggcctgagcaggcatctcctggggagcatgcagttcaccggcctttgccagcccaggctgggaccctccaggtggtggggcaggtgcttccatagcccctcctggctccttggcttcccactccctcctctccccacagaccctacgtccgctccaagggccggaagttcgagcgtgccagaggccgacgggccagccgaggctacaaaaactaaccctggatcctactctcttattaaaaagatttttgctgac

SEQ ID NO: 5574 - DNA, 2262 bp, Homo sapiens
ggcacgagggttcgaagatggcggcgcgcaagggtcggcgtcgcacgtgtgaaaccggggaacccatggaagccgagtccggcgacacaagttccgagggcccggcccaggtctacctgcccggccgggggccgccgctacgcgaaggggaggagctggtcatggacgaggaggcctatgtgctctaccaccgagcgcagactggcgccccctgtctcagctttgacatagtccgggatcacctgggagacaaccggacagagcttcctcttacactttacttgtgtgctgggacccaggctgagagcgcccagagcaacagactgatgatgcttcggatgcacaatctgcatgggacaaagcccccaccctcagagggcagtgatgaagaagaagaggaggaagatgaagaggatgaagaagagcggaaacctcagctggagctggccatggtgccccactatggtggcatcaaccgagttcgggtgtcatggctgggtgaagagcctgtggctggggtgtggtcagagaagggccaggtggaggtgtttgcgctgcggcggcttctgcaggtggtggaggagccccaggccctggcagccttcctccgggatgagcaggcccaaatgaagcccatcttctccttcgctggacacatgggcgagggctttgcccttgactggtccccccgggtgaccggtcgcctgctgaccggtgactgtcaaaagaacatccacctctggacacctacggacggcggctcctggcacgtggaccagcggccattcgtgggccacacacgctctgtggaggacctgcagtggtcaccgactgagaacacggtgtttgcctcctgctcagctgacgcctccatccgcatctgggacatccgggcagcccccagcaaggcctgcatgctcaccacagccaccgcccatgatggggacgtcaatgtcatcagctggagccgccgggagcccttcctgctcagtggcggggatgatggggccctcaagatctgggaccttcggcagttcaagtctggttccccagtggccaccttcaagcagcacgtggcccccgtgacctccgtcgagtggcacccccaggacagcggggtctttgcagcctcgggtgcagaccaccagatcacacagtgggacctggcagtggagcgggaccctgaggcgggcgacgtggaggccgaccccggactggccgacctcccgcagcagctgctgttcgtgcaccagggcgagaccgagctgaaggagctgcactggcacccgcagtgcccagggctcctggtcagcacggcgctgtcaggcttcaccatcttccgcaccatcagcgtctgaggcgtcccactggctctgatcttgcttcctgcttggaaactgaagtcgaattgggctcccctggaaggggttcattcaggtctgttgactgagactggccggcctgtgggctgccgtgatggattctgtttgacgtattgttctctagaaggcctggctctgatccagtgacccctctcaccaaagaactcggtttaaccagggctctgtaagaccactcccacccagagacttgtgtggcctggtgtggcctgtgtgtcggattccttcctgtcagctgtgacccatttgacctgtgtccccagaacccagttttttgtttgtttgtttgagacggagtcttggtctgtcgcccaggctggagtgcagtagcacgatcttggctcactgcaacctccgcctcctgggttaaagtgattctctcagctcagtctcccaggtagctgggattacaggcatgtgccaccacaccccgttaatttttgtatttttagtagagacggggtttcaccatgttggccaggctggtctcaaattcttgatctcaagtgatctgtccgccccggcctcccagagtgctgggttgggattacaggcgtgagccaccgcgtccggctcaggacccagttttggctgctggttcccagcaggggactcgggggatatacagtggctgcaccaaattggaggtgtgggttcctccaacacaatttgcttctgcccgttgtcttcctgccagctgggtttggccaggatttctccgtgtgggggctacatgcgaccctctcccctcctccctgactttagaggctggtgctgtgtcgggaggaaggtcagggctcctgagcagcaataaaggaccaggaagaggcctgaggtgtaacaaaaaaaaaaaaaaaaaaaa

SEQ ID NO: 5575 - protein, 446 aa, Homo sapiens
MAARKGRRRTCETGEPMEAESGDTSSEGPAQVYLPGRGPPLREGEELVMDEEAYVLYHRAQTGAPCLSFDIVRDHLGDNRTELPLTLYLCAGTQAESAQSNRLMMLRMHNLHGTKPPPSEGSDEEEEEEDEEDEEERKPQLELAMVPHYGGINRVRVSWLGEEPVAGVWSEKGQVEVFALRRLLQVVEEPQALAAFLRDEQAQMKPIFSFAGHMGEGFALDWSPRVTGRLLTGDCQKNIHLWTPTDGGSWHVDQRPFVGHTRSVEDLQWSPTENTVFASCSADASIRIWDIRAAPSKACMLTTATAHDGDVNVISWSRREPFLLSGGDDGALKIWDLRQFKSGSPVATFKQHVAPVTSVEWHPQDSGVFAASGADHQITQWDLAVERDPEAGDVEADPGLADLPQQLLFVHQGETELKELHWHPQCPGLLVSTALSGFTIFRTISV

SEQ ID NO: 5576 - DNA, 1086 bp, Homo sapiens
ctaaaggtcccctccccggagcggagcgcacctagggtccctcttccgtccccccagcccagctacccgttcagaccagcagcctcggggggcaccccccgccagcctgcctccctcccgctcagccctgccagggttccccagccatgaatctcttccgattcctgggagacctctcccacctcctcgccatcatcttgctactgctcaaaatctggaagtcccgctcgtgcgccggaatttcagggaagagccaggtcctgtttgctgtggtgttcactgcccgatatctggacctcttcaccaactacatctcactctacaacacgtgtatgaaggtggtctacatagcctgctccttcaccacggtctggttgatttatagcaagttcaaagctacttacgatgggaaccatgacacgttcagagtggagttcctggtcgttcccacagccattctggcgttcctggtcaatcatgacttcacccctctggagatcctctggaccttctccatctacctggagtcagtggccatcttgccgcagctgttcatggtgagcaagaccggcgaggcggagaccatcaccagccactacttgtttgcgctaggcgtttaccgcacgctctatctcttcaactggatctggcgctaccatttcgagggcttcttcgacctcatcgccattgtggcaggcctggtccagacagtcctctactgcgatttcttctacctctatatcaccaaagtcctaaaggggaagaagttgagtttgccggcatagccccggtcctctccatctctctcctcggcagcagcgggaggcagaggaaggcggcagaagatgaagagctttcccatccaggggtgacttttttaagaacccacctcttgtgctccccatcccgcctcctgccgggtttcagggggacagtggaggatccaggtcttggggagctcaggacttgggctgtttgtagttttttgccttttagacaagaaaaaaaaatctttccactctttagtttttgattctgatgactcgttttttcttctactctgtggccccaaattttataaagtga

SEQ ID NO: 5577 - protein, 212 aa, Homo sapiens
MNLFRFLGDLSHLLAIILLLLKIWKSRSCAGISGKSQVLFAVVFTARYLDLFTNYISLYNTCMKVVYIACSFTTVWLIYSKFKATYDGNHDTFRVEFLVVPTAILAFLVNHDFTPLEILWTFSIYLESVAILPQLFMVSKTGEAETITSHYLFALGVYRTLYLFNWIWRYHFEGFFDLIAIVAGLVQTVLYCDFFYLYITKVLKGKKLSLPA

SEQ ID NO: 5578 - DNA, 1986 bp, Homo sapiens
aagaagtggcgaagttacttttgagggtatttgagtagcggcggtgtgtcaggggctaaagaggaggacgaagaaaagcagagcaagggaacccagggcaacaggagtagttcactccgcgagaggccgtccacgagacccccgcgcgcagccatgagccccgccccccgctgttgcttggagaggggcgggacctggagagaggctgctccgtgaccccaccatgtcctctcctaccacgagttccctggatacccccctgcctggaaatggcccccctcagcctggcgccccttcttcttcacccactgtaaaggaggagggtccggagccgtggcccgggggtccggaccctgatgtcccaggcactgatgaggccagctcagcctgcagcacagactgggtcatcccagatcccgaagaggaaccagagcgcaagcgaaagaagggcccagccccgaagatgctgggccacgagctttgccgtgtctgtggggacaaggcctccggcttccactacaacgtgctcagctgcgaaggctgcaagggcttcttccggcgcagtgtggtccgtggtggggccaggcgctatgcctgccggggtggcggaacctgccagatggacgctttcatgcggcgcaagtgccagcagtgccggctgcgcaagtgcaaggaggcagggatgagggagcagtgcgtcctttctgaagaacagatccggaagaagaagattcggaaacagcagcaggagtcacagtcacagtcgcagtcacctgtggggccgcagggcagcagcagctcagcctctgggcctggggcttcccctggtggatctgaggcaggcagccagggctccggggaaggcgagggtgtccagctaacagcggctcaagaactaatgatccagcagttggtggcggcccaactgcagtgcaacaaacgctccttctccgaccagcccaaagtcacgccctggcccctgggcgcagacccccagtcccgagatgcccgccagcaacgctttgcccacttcacggagctggccatcatctcagtccaggagatcgtggacttcgctaagcaagtgcctggtttcctgcagctgggccgggaggaccagatcgccctcctgaaggcatccactatcgagatcatgctgctagagacagccaggcgctacaaccacgagacagagtgtatcaccttcttgaaggacttcacctacagcaaggacgacttccaccgtgcaggcctgcaggtggagttcatcaaccccatcttcgagttctcgcgggccatgcggcggctgggcctggacgacgctgagtacgccctgctcatcgccatcaacatcttctcggccgaccggcccaacgtgcaggagccgggccgcgtggaggcgttgcagcagccctacgtggaggcgctgctgtcctacacgcgcatcaagaggccgcaggaccagctgcgcttcccgcgcatgctcatgaagctggtgagcctgcgcacgctgagctctgtgcactcggagcaggtcttcgccttgcggctccaggacaagaagctgccgcctctgctgtcggagatctgggacgtccacgagtgaggggctggccacccagccccacagccttgcctgaccaccctccagcagatagacgccggcaccccttcctcttcctagggtggaaggggccctgggccgagcctgtagacctatcggctctcatcccttgggataagccccagtccaggtccaggaggctccctccctgcccagcgagtcttccagaaggggtgaaagggttgcaggtcccgaccactgacccttcccggctgccctccctccccagcttacacctcaagcccagcacgcagtgcaccttgaacagagggaggggaggacccatggctctcccccctagcccgggagaccagggccttcctcttcctctgcttttatttaataaaaactaaaaacagaaa

SEQ ID NO: 5579 - protein, 460 aa, Homo sapiens
MSSPTTSSLDTPLPGNGPPQPGAPSSSPTVKEEGPEPWPGGPDPDVPGTDEASSACSTDWVIPDPEEEPERKRKKGPAPKMLGHELCRVCGDKASGFHYNVLSCEGCKGFFRRSVVRGGARRYACRGGGTCQMDAFMRRKCQQCRLRKCKEAGMREQCVLSEEQIRKKKIRKQQQESQSQSQSPVGPQGSSSSASGPGASPGGSEAGSQGSGEGEGVQLTAAQELMIQQLVAAQLQCNKRSFSDQPKVTPWPLGADPQSRDARQQRFAHFTELAIISVQEIVDFAKQVPGFLQLGREDQIALLKASTIEIMLLETARRYNHETECITFLKDFTYSKDDFHRAGLQVEFINPIFEFSRAMRRLGLDDAEYALLIAINIFSADRPNVQEPGRVEALQQPYVEALLSYTRIKRPQDQLRFPRMLMKLVSLRTLSSVHSEQVFALRLQDKKLPPLLSEIWDVHE

SEQ ID NO: 5580 - DNA, 3443 bp, Homo sapiens
agtcaggggtcacggcggcgtaggctgtggcgggaaacgctgtttgaagcgggatggatggcaagcggcggccaggcccagggcccggggtgcccccaaagcgggcccgtgggggcctctgggatgatgatgatgcaccttggccatcccaattcgaggaggacctggcactgatggaggagatggaggcagaacacaggctgcaggagcaggaggaggaggagctgcagtcagtcctggagggggttgcagacgggcaggtcccaccatcagccatagatcctcgctggcttcggcccacaccaccagcgctggacccccagacagagcccctcatcttccaacagttggagattgaccattatgtgggcccagcgcagcctgtgcctggggggcccccaccatcccgcggctccgtgcctgtgctccgcgccttcggggtcaccgatgaggggttctctgtctgctgccacatccacggcttcgctccctacttctacaccccagcgccccctggtttcgggcccgagcacatgggtgacctgcaacgggagctgaacttggccatcagccgggacagtcgcggggggagggagctgactgggccggccgtgctggctgtggaactgtgctcccgagagagcatgtttgggtaccacgggcacggcccctccccgttcctgcgcatcaccgtggcgctgccgcgcctcgtggccccggcccgccgtctcctggaacagggcatccgtgtggcaggcctgggcacgcccagcttcgcgccctacgaggccaacgtcgactttgagatccggttcatggtggacacggacatcgtcggctgcaactggctggagctcccagctgggaaatacgccctgaggctgaaggagaaggctacgcagtgccagctggaggcggacgtgctgtggtctgacgtggtcagtcacccaccggaagggccatggcagcgcattgcgcccttgcgcgtgctcagcttcgatatcgagtgcgccggccgcaaaggcatcttccctgagcctgagcgggaccctgtcatccagatctgctcgctgggcctgcgctggggggagccggagcccttcctacgcctggcgctcaccctgcggccctgtgcccccatcctgggtgccaaggtgcagagctacgagaaggaggaggacctgctgcaggcctggtccaccttcatccgtatcatggaccccgacgtgatcaccggttacaacatccagaacttcgaccttccgtacctcatctctcgggcccagaccctcaaggtacaaacattccctttcctgggccgtgtggccggcctttgctccaacatccgggactcttcattccagtccaagcagacgggccggcgggacaccaaggttgtcagcatggtgggccgcgtgcagatggacatgctgcaggtgctgctgcgggagtacaagctccgctcccacacgctcaatgccgtgagcttccacttcctgggcgagcagaaggaggacgtgcagcacagcatcatcaccgacctgcagaatgggaacgaccagacccgccgccgcctggctgtgtactgcctgaaggatgcctacctgccactgcggctgctggagcggctcatggtgctggtgaacgccgtggagatggcgagggtcactggcgtgcccctcagctacctgctcagtcgtggccagcaggtcaaagtcgtatcccagctgttgcggcaggccatgcacgaggggctgctgatgcccgtggtgaagtcagagggcggcgaggactacacgggagccactgtcatcgagcccctcaaagggtactacgacgtccccatcgccaccctggacttctcctcgctgtacccgtccatcatgatggcccacaacctgtgttacaccacgctccttcggcccgggactgcacagaaactgggcctgactgaggatcagttcatcaggacccccaccggggacgagtttgtgaagacctcagtgcggaaggggctgctgccccagatcctggagaacctgctcagtgcccggaagagggccaaggccgagctggccaaggagacagaccccctccggcgccaggtcctggatggacggcagctggcgctgaaggtgagcgccaactccgtatacggcttcactggcgcccaggtgggcaagttgccgtgcctggagatctcacagagcgtcacggggttcggacgtcagatgatcgagaaaaccaagcagctggtggagtctaagtacacagtggagaatggctacagcaccagtgccaaggtggtgtatggtgacactgactccgtcatgtgccgattcggcgtgtcctcggtggctgaggcgatggccctggggcgggaggccgcggactgggtgtcaggtcacttcccgtcgcccatccggctggagtttgagaaggtctacttcccatacctgcttatcagcaagaagcgctacgcgggcctgctcttctcctcccggcccgacgcccacgaccgcatggactgcaagggcctggaggccgtgcgcagggacaactgccccctcgtggccaacctggtcactgcctcactgcgccgcctgctcatcgaccgagaccctgagggcgcggtggctcacgcacaggacgtcatctcggacctgctgtgcaaccgcatcgatatctcccagctggtcatcaccaaggagctgacccgcgcggcctccgactatgccggcaagcaggcccacgtggagctggccgagaggatgaggaagcgggaccccgggagtgcgcccagcctgggcgaccgcgtcccctacgtgatcatcagtgccgccaagggtgtggccgcctacatgaagtcggaggacccgctgttcgtgctggagcacagcctgcccattgacacgcagtactacctggagcagcagctggccaagcccctcctgcgcatcttcgagcccatcctgggcgagggccgtgccgaggctgtgctactgcggggggaccacacgcgctgcaagacggtgctcacgggcaaggtgggcggcctcctggccttcgccaaacgccgcaactgctgcattggctgccgcacagtgctcagccaccagggagccgtgtgtgagttctgccagccccgggagtctgagctgtatcagaaggaggtatcccatctgaatgccctggaggagcgcttctcgcgcctctggacgcagtgccagcgctgccagggcagcctgcacgaggacgtcatctgcaccagccgggactgccccatcttctacatgcgcaagaaggtgcggaaggacctggaagaccaggagcagctcctgcggcgcttcggaccccctggacctgaggcctggtgaccttgcaagcatcccatggggcgggggcgggaccagggagaattaataaagttctggacttttgct

SEQ ID NO: 5581 - protein, 1107 aa, Homo sapiens
MDGKRRPGPGPGVPPKRARGGLWDDDDAPWPSQFEEDLALMEEMEAEHRLQEQEEEELQSVLEGVADGQVPPSAIDPRWLRPTPPALDPQTEPLIFQQLEIDHYVGPAQPVPGGPPPSRGSVPVLRAFGVTDEGFSVCCHIHGFAPYFYTPAPPGFGPEHMGDLQRELNLAISRDSRGGRELTGPAVLAVELCSRESMFGYHGHGPSPFLRITVALPRLVAPARRLLEQGIRVAGLGTPSFAPYEANVDFEIRFMVDTDIVGCNWLELPAGKYALRLKEKATQCQLEADVLWSDVVSHPPEGPWQRIAPLRVLSFDIECAGRKGIFPEPERDPVIQICSLGLRWGEPEPFLRLALTLRPCAPILGAKVQSYEKEEDLLQAWSTFIRIMDPDVITGYNIQNFDLPYLISRAQTLKVQTFPFLGRVAGLCSNIRDSSFQSKQTGRRDTKVVSMVGRVQMDMLQVLLREYKLRSHTLNAVSFHFLGEQKEDVQHSIITDLQNGNDQTRRRLAVYCLKDAYLPLRLLERLMVLVNAVEMARVTGVPLSYLLSRGQQVKVVSQLLRQAMHEGLLMPVVKSEGGEDYTGATVIEPLKGYYDVPIATLDFSSLYPSIMMAHNLCYTTLLRPGTAQKLGLTEDQFIRTPTGDEFVKTSVRKGLLPQILENLLSARKRAKAELAKETDPLRRQVLDGRQLALKVSANSVYGFTGAQVGKLPCLEISQSVTGFGRQMIEKTKQLVESKYTVENGYSTSAKVVYGDTDSVMCRFGVSSVAEAMALGREAADWVSGHFPSPIRLEFEKVYFPYLLISKKRYAGLLFSSRPDAHDRMDCKGLEAVRRDNCPLVANLVTASLRRLLIDRDPEGAVAHAQDVISDLLCNRIDISQLVITKELTRAASDYAGKQAHVELAERMRKRDPGSAPSLGDRVPYVIISAAKGVAAYMKSEDPLFVLEHSLPIDTQYYLEQQLAKPLLRIFEPILGEGRAEAVLLRGDHTRCKTVLTGKVGGLLAFAKRRNCCIGCRTVLSHQGAVCEFCQPRESELYQKEVSHLNALEERFSRLWTQCQRCQGSLHEDVICTSRDCPIFYMRKKVRKDLEDQEQLLRRFGPPGPEAW

SEQ ID NO: 5582 - DNA, 1273 bp, Homo sapiens
gcctccttccgtctgtaactcacctaaagacccaagacctgcgacatccgtagaccgcgcccgctatgcacagctaaagagcactcacccctcgcgcaccagtcccggcccggcagccgctgccccgggctcgactgggcgctgctaccgccatcagcaagagcaggagcagccgggttgccccagcgctggctgccgccatctcggcttcttcccaccagcgaagggacggctgtgagccaagagccgcggagcacgccgggaggaacaggccgcatcctgacgcccgtgcgcctgcgctgggccccggcacctgcgcactggcacccgtccgcacctggggcctgacgtcagcaggatggggccgcccctttggcctgatctccaggagccgccccctccagggacgtcatcacaaatcaggagcccgctcttgtgtgacgtcataaagcccgctccgcatcatgacgtcacagtgcgcgtagtcccgccccctcgctttctccctctgctcctccgtccgctcccgtcggacggggacattgcaatgaggcgggatcgcggccctaagccggccctgggtggagctggcgaggtggaaccaggtgggatggcagcctctcccacgggccgtcccagacggctccaacgctacctccagagcggcgaattcgaccagtttcgggacttccccatctttgagagcaacttcgtacagttctgccccgacatctatcctgccccgacctctgacctctggccccaggtgactcggttgggagaagttgccaacgaggtcaccatgggggtggcagcctccagtccagccctggagctcccggacctattgcttctggccggccctgccaaggagaacggacacctgcaactcttcgggctgttccccttgaagttcgtccagctctttgtccacgacaaaagccggtgtcagctcgaggtcaagttgaacaccagccgcaccttctacttgcagctgcgggccccactcaagacccgagaccgagagttcggccagtgggtgcggctgctctaccgcctgcgcttcctctctgcttctgctgtgcccttcacgcaggagtaagagccccaaggcgtggaagccagacttgaccccaagacctctgaactctggggactctgagtcttccagcatccttcaaggtcaccgaatgaccagagatcaaagtaccttgcctcagggccgggcagatgagatattaaagttaataaaggtcagtccattaagaaccaa

SEQ ID NO: 5583 - protein, 247 aa, Homo sapiens
MGPPLWPDLQEPPPPGTSSQIRSPLLCDVIKPAPHHDVTVRVVPPPRFLPLLLRPLPSDGDIAMRRDRGPKPALGGAGEVEPGGMAASPTGRPRRLQRYLQSGEFDQFRDFPIFESNFVQFCPDIYPAPTSDLWPQVTRLGEVANEVTMGVAASSPALELPDLLLLAGPAKENGHLQLFGLFPLKFVQLFVHDKSRCQLEVKLNTSRTFYLQLRAPLKTRDREFGQWVRLLYRLRFLSASAVPFTQE

SEQ ID NO: 5584 - DNA, 1910 bp, Homo sapiens
gccgtcccttcgctggtgggaagaagccgagatggcggcagccagcgctggggcaacccggctgctcctgctcttgctgatggcggtagcagcgcccagtcgagcccggggcagcggctgccgggccgggactggtgcgcgaggggctggggcggaaggtcgagagggcgaggcctgtggcacggtggggctgctgctggagcactcatttgagatcgatgacagtgccaacttccggaagcggggctcactgctctggaaccagcaggatggtaccttgtccctgtcacagcggcagctcagcgaggaggagcggggccgactccgggatgtggcagccctgaatggcctgtaccgggtccggatcccaaggcgacccggggccctggatggcctggaagctggtggctatgtctcctcctttgtccctgcgtgctccctggtggagtcgcacctgtcggaccagctgaccctgcacgtggatgtggccggcaacgtggtgggcgtgtcggtggtgacgcaccccgggggctgccggggccatgaggtggaggacgtggacctggagctgttcaacacctcggtgcagctgcagccgcccaccacagccccagccctgagacggcggccttcattgagcgcctggagatggaacaggcccagaaggccaagaacccccaggagcagaagtccttcttcgccaaatactggatgtacatcattcccgtcgtcctgttcctcatgatgtcaggagcgccagacaccgggggccagggtgggggtgggggtgggggtggtggtgggggtagtggccggtgagggcccaggctggtcagcgtcccgtcttgcacacccaggggcctccctttctgctggagtcccctgtgtcctcagccatcccaagaagggtttgctggtccctcctttccccccgtcccacgaggccacctgggccagccccttgtcctctgccttctgctggcagaggagcagctggactggggcctttggcacagcagccggtgtctcctgcgcccgcctcccccatggccccatgcagccccaggggcttcccccctgcccatggagtagagcccgagatcctggccactatgccagttctgacctcgcatccccctaccccgagcccatgcagtctgggaacatgccgccttctctccagcctctgtgcctttgttccaggtggtctcaccctcctgtccctggctgggctaggtggtcctgtccaggctcctgcagcgcccccctcactttgacactggactaggatgcagcctcccttctgtgtccccttgagggtaccctgggtcccctcatcaggggcagaggcatgaaagagtcggggctggatggccgggggcttctgggcccgacgcctagtgcagcccctggggtcgtggtttgacatttgtctgcctggtgcaaacaaggaatccttgcctttaaggtgacaggccctccacaggcttccagacttgaaggaaaaggtttaagaaagaaaacaaaaccaacagttagtggagtcaaagcccagacactgtaaatagaaccccctccaccaccccccgccgcccagcatcctacctggactgcggtgctacgagggcctgcgggcctttgctgtgtgccaccctccctgtaagtctatttaaaaacatcgacgatacattgaaatgtgtgaacgttttgaaaagctacagcttccagcagccaaaagcaactgttgttttggcaagacggtcctgatgtacaagcttgattgaaattcactgctcacttgatacgttattcagaaacccaaggaatggctgtccccatcctcatgtggctgtgtggagctcagctgtgttgtgtggcagtttattaaactgtcccccagatcgacacgc

SEQ ID NO: 5585 - protein, 259 aa, Homo sapiens
MAAASAGATRLLLLLLMAVAAPSRARGSGCRAGTGARGAGAEGREGEACGTVGLLLEHSFEIDDSANFRKRGSLLWNQQDGTLSLSQRQLSEEERGRLRDVAALNGLYRVRIPRRPGALDGLEAGGYVSSFVPACSLVESHLSDQLTLHVDVAGNVVGVSVVTHPGGCRGHEVEDVDLELFNTSVQLQPPTTAPGPETAAFIERLEMEQAQKAKNPQEQKSFFAKYWMYIIPVVLFLMMSGAPDTGGQGWGWGWGWWWG

SEQ ID NO: 5586 - DNA, 2889 bp, Homo sapiens
atgggggtggggggatgcgggctggcagcgggagagctggggacagatgcggagccctcccttcacctgcccacacctgtcacctccacggttgccttgtctgccaccttacctctctctccctcagattctcccatgagtctgactcaagtctctgaagctgctgtgaggcccccacagggcctggacaggcctctcccccttctctcccccacccacagccccccagcgtccacgcggagcatgaacattgaggatggcgcgtgcccgcggctccccgtgccccccgctgccgcccgcaaccaggccagccgggtgatctgcacacggagagacctggccgaggtcccagccagcatcccggtcaacacgcggtacctgaacctgcaagagaacggcatccagggtgggaggacttggctgctcccatctgaccatcctgagagccagattcagggaagaaaagggacctctcaggggagcagtcccttcctggtggctgtggggcaagggccagcgaaggggtccagaaacgggttcttgcaccgccccctgccccacccagagacatggatggagggtgtgttcgtccagtccacgagagtggatgcttctgggtcactgcgtgctgagcgccgagcagcctcaggctgtccgcctgtggccacgctgttgtcacggtcctctgtccagaggcaccaaggagacttggaaaacactgtgggctggagccccaggtgcacgctccccgggaccggcagccctgctgagtcacttgacttcaccgagccttggtctcctgtctctgaaatgacgtgtgatgctcacctccagggctgccgggggagtcagcaggagcctggggtgccgcagaggctccgggagctgcaggcaggagcgatcagtgatgaccgggacctcctcctcctgttactattattgatgttattattattaatagaaatagcaaccgagtgcctgctttatcaatcaccagcatttcccagggaggtgataagctgcgtttgggcatggtacaagtttctcaacgccaacgataacgataacaatgagaatgacgacgtgctgagcacccctgaacactgggacctcatctcctctccctcaccctctgaagtgcttttcatcatcctcctcgtggtgatccggacggacacgttcaagcacctgcggcacctggagattctgcagctgagcaagaacctggtgcgcaagatcgaggtgggcgccttcaacgggctgcccagcctcaacacgctggagctttttgacaaccggctgaccacggtgcccacgcaggccttcgagtacctgtccaagctgcgggagctctggctgcggaacaaccccatcgagagcatcccctcctacgccttcaaccgcgtgccctcgctgcggcgcctggacctgggcgagctcaagcggctggaatacatctcggaggcggccttcgaggggctggtcaacctgcgctacctcaacctgggcatgtgcaacctcaaggacatccccaacctgacggccctggtgcgcctggaggagctggagctgtcgggcaaccggctggacctgatccgcccgggctccttccagggtctcaccagcctgcgcaagctgtggctcatgcacgcccaggtagccaccatcgagcgcaacgccttcgacgacctcaagtcgctggaggagctcaacctgtcccacaacaacctgatgtcgctgccccacgacctcttcacgcccctgcaccgcctcgagcgcgtgcacctcaaccacaacccctggcattgcaactgcgacgtgctctggctgagctggtggctcaaggagacggtgcccagcaacacgacgtgctgcgcccgctgtcatgcgcccgccggcctcaaggggcgctacattggggagctggaccagtcgcatttcacctgctatgcgcccgtcatcgtggagccgcccacggacctcaacgtcaccgagggcatggctgccgagctcaaatgccgcacgggcacctccatgacctccgtcaactggctgacgcccaacggcaccctcatgacccacggctcctaccgcgtgcgcatctccgtcctgcatgacggcacgcttaacttcaccaacgtcaccgtgcaggacacgggccagtacactggtggtgttggagggggcagtggcggctacacctacttcaccacggtgaccgtggagaccctggagacgcagcccggagaggaggccctgcagccgcgggggacggagaaggaaccgccagggcccacgacagacggtgtctggggtgggggccggcctggggacgcggccggccctgcctcgtcttctaccacggcacccgccccgcgctcctcgcggcccacggagaaggcgttcacggtgcccatcacggatgtgacggagaacgccctcaaggacctggacgacgtcatgaagaccaccaaaatcatcatcggctgcttcgtggccatcacgttcatggccgcggtgatgctcgtggccttctacaagctgcgcaagcagcaccagctccacaagcaccacgggcccacgcgcaccgtggagatcatcaacgtggaggacgagctgcccgccgcctcggccgtgtccgtggccgccgcggccgccgtggccagtgggggtggtgtgggcggggacagccacctggccctgcccgccctggagcgagaccacctcaaccaccaccactacgtggctgccgccttcaaggcgcactacagcagcaaccccagcggcgggggctgcgggggcaaaggcccgcctggcctcaactccatccacgaacctctgctcttcaagagcggctccaaggagaacgtgcaagagacgcagatctga

SEQ ID NO: 5587 - protein, 938 aa, Homo sapiens [sequence omitted]

SEQ ID NO: 5588 - DNA, 1316 bp, Homo sapiens
cactcattaagaacagaggaggctgcctgttactcctggtgttgcatccctccagacactctgctgtttcctgcctaggcgtggctgcagccatggctaggaaagcgctgccacccacccacctgggccagagctggttctgctcctgctgcagggacactgagctggctatctcggcgcttcgggcaagaactgcaacaggctctcctgggtcctgcaggtgtacagccgggcccctgccttgtgcctcagctctcgagagctgctgctgccgggtgacctgatccaacctgataaggtgccatcttcagctaccactgcaaggccctgagggcaacagcagcacggcactgcccacccggctgctgatggcctggtgccagctgggagtcctcccggcacttcgaggccactgagccacccttccagccccagcccaccatggacaggggtatccagcttcctcctcaacctcgtcctctgcccctgagccagtgacgcccaaggacatgcctgttacccaggtcctgtaccagcactagctggtcaagggcatgacagtgctggaggccgtcttggagatccaggccatcactggcagcaggctgctctccatggtgccagggcccgccaggccaccaggctcatgctgggacccaacccagtgcacaaggacttggctgctgagccacacacccaggagaaggtggataagtgggctaccaagggcttcctgcaggctaggggaggagccacccccgcttccctattgtgaccaggcctatggggaggagctgtccatacgccaccgtgagacctgggcctggctctcaaggacagacaccgcctggcctggtgctccaggggtgaagcaggccagaatcctgggggagctgctcctggtttgagctgcattcaggaagtgcgggacatggtaggggaggcaaaaagccttgggcactaccctccctgtggagctgttcggtgtccgtcgagctagccacaccctgacaccatgttcaagggtaccggaagagaagggtgtctgcccccaacctcccctgtgggtgtcactggccagatgtcatgagggaagcaggccttgtgagtggacactgaccatgagtccctggggggagtgatcccccaggcatcgtgtgccatgttgcacttctgcccaggcagcagggtgggtgggtaccatgggtgcccacccctccaccacatggggccccaaagcactgcaggccaagcagggcaaccccacacccttgacataaaagcatcttgaagcttttaaaaaaaaaaaaaaaaaa

SEQ ID NO: 5589 - protein, 117 aa, Homo sapiens
MTVLEAVLEIQAITGSRLLSMVPGPARPPGSCWDPTQCTRTWLLSHTPRRRWISGLPRASCRLGEEPPPLPYCDQAYGEELSIRHRETWAWLSRTDTAWPGAPGVKQARILGELLLV

SEQ ID NO: 5590 - DNA, 1466 bp, Homo sapiens
agccccaagcttaccacctgcacccggagagctgtgtgtcaccatgtgggtcccggttgtcttcctcaccctgtccgtgacgtggattggtgctgcacccctcatcctgtctcggattgtgggaggctgggagtgcgagaagcattcccaaccctggcaggtgcttgtggcctctcgtggcagggcagtctgcggcggtgttctggtgcacccccagtgggtcctcacagctgcccactgcatcaggaacaaaagcgtgatcttgctgggtcggcacagcctgtttcatcctgaagacacaggccaggtatttcaggtcagccacagcttcccacacccgctctacgatatgagcctcctgaagaatcgattcctcaggccaggtgatgactccagccacgacctcatgctgctccgcctgtcagagcctgccgagctcacggatgctgtgaaggtcatggacctgcccacccaggagccagcactggggaccacctgctacgcctcaggctggggcagcattgaaccagaggagttcttgaccccaaagaaacttcagtgtgtggacctccatgttatttccaatgacgtgtgtgcgcaagttcaccctcagaaggtgaccaagttcatgctgtgtgctggacgctggacagggggcaaaagcacctgctcgggtgattctgggggcccacttgtctgtaatggtgtgcttcaaggtatcacgtcatggggcagtgaaccatgtgccctgcccgaaaggccttccctgtacaccaaggtggtgcattaccggaagtggatcaaggacaccatcgtggccaacccctgagcacccctatcaaccccctattgtagtaaacttggaaccttggaaatgaccaggccaagactcaagcctccccagttctactgacctttgtccttaggtgtgaggtccagggttgctaggaaaagaaatcagcagacacaggtgtagaccagagtgtttcttaaatggtgtaattttgtcctctctgtgtcctggggaatactggccatgcctggagacatatcactcaatttctctgaggacacagataggatggggtgtctgtgttatttgtggggtacagagatgaaagaggggtgggatccacactgagagagtggagagtgacatgtgctggacactgtccatgaagcactgagcagaagctggaggcacaacgcaccagacactcacagcaaggatggagctgaaaacataacccactctgtcctggaggcactgggaagcctagagaaggctgtgagccaaggagggagggtcttcctttggcatgggatggggatgaagtaaggagagggactggaccccctggaagctgattcactatggggggaggtgtattgaagtcctccagacaaccctcagatttgatgatttcctagtagaactcacagaaataaagagctgttatactgtg

SEQ ID NO: 5591 - protein, 261 aa, Homo sapiens
MWVPVVFLTLSVTWIGAAPLILSRIVGGWECEKHSQPWQVLVASRGRAVCGGVLVHPQWVLTAAHCIRNKSVILLGRHSLFHPEDTGQVFQVSHSFPHPLYDMSLLKNRFLRPGDDSSHDLMLLRLSEPAELTDAVKVMDLPTQEPALGTTCYASGWGSIEPEEFLTPKKLQCVDLHVISNDVCAQVHPQKVTKFMLCAGRWTGGKSTCSGDSGGPLVCNGVLQGITSWGSEPCALPERPSLYTKVVHYRKWIKDTIVANP

SEQ ID NO: 5592 - DNA, 1505 bp, Homo sapiens
ggcggacaaaacccgattgttcctgggccctttccccatcgcgcctgggcctgctccccagcccggggcaggggcgggggccagtgtggtgacacacgctgtagctgtctccccggctggctggctcgctctctcctggggacacagaggtcggcaggcagcacacagagggacctacgggcagctgttccttcccccgactcaagaatccccggaggcccggaggcctgcagcaggagcggccatgaagaagctgatggtggtgctgagtctgattgctgcagcctgggcagaggagcagaataagttggtgcatggcggaccctgcgacaagacatctcacccctaccaagctgccctctacacctcgggccacttgctctgtggtggggtccttatccatccactgtgggtcctcacagctgcccactgcaaaaaaccgaatcttcaggtcttcctggggaagcataaccttcggcaaagggagagttcccaggagcagagttctgttgtccgggctgtgatccaccctgactatgatgccgccagccatgaccaggacatcatgctgttgcgcctggcacgcccagccaaactctctgaactcatccagccccttcccctggagagggactgctcagccaacaccaccagctgccacatcctgggctggggcaagacagcagatggtgatttccctgacaccatccagtgtgcatacatccacctggtgtcccgtgaggagtgtgagcatgcctaccctggccagatcacccagaacatgttgtgtgctggggatgagaagtacgggaaggattcctgccagggtgattctgggggtccgctggtatgtggagaccacctccgaggccttgtgtcatggggtaacatcccctgtggatcaaaggagaagccaggagtctacaccaacgtctgcagatacacgaactggatccaaaaaaccattcaggccaagtgaccctgacatgtgacatctacctcccgacctaccaccccactggctggttccagaacgtctctcacctagaccttgcctcccctcctctcctgcccagctctgaccctgatgcttaataaacgcagcgacgtgagggtcctgattctccctggttttaccccagctccatccttgcatcactggggaggacgtgatgagtgaggacttgggtcctcggtcttacccccaccactaagagaatacaggaaaatcccttctaggcatctcctctccccaacccttccacacgtttgatttcttcctgcagaggcccagccacgtgtctggaatcccagctccgctgcttactgtcggtgtccccttgggatgtacctttcttcactgcagatttctcacctgtaagatgaagataaggatgatacagtctccataaggcagtggctgttggaaagatttaaggtttcacacctatgacatacatggaatagcacctgggccaccatgcactcaataaagaatgaatttt

SEQ ID NO: 5593 - DNA, 852 bp, Homo sapiens
caccctgtaagtggctgcggcgggaagatggcggagctgcgcgtgctcgtagctgtcaagagggtcatcgactacgccgtgaagatccgagtgaagcctgacaggaccggtgtggtcacggatggtgtgaagcactccatgaaccccttctgtgagatcgcggtggaggaggctgtgcggctcaaggagaagaagctggtgaaggaggtcatcgccgtcagctgtgggcctgcacagtgccaggagacgattcgtaccgccctggccatgggtgcagaccgaggtatccacgtggaggtgcccccagcagaagcagaacgcttgggtcccctgcaggtggctcgggtcctggccaagctggcagagaaggagaaggtggacctggtgctgctgggcaaacaggccatcgatgatgactgtaaccagacagggcagatgacagctggatttcttgactggccacagggcacattcgcctcccaggtgacgctggagggggacaagttgaaagtggagcgggagatcgatgggggcctggagaccctgcgcctgaagctgccagctgtggtgacagctgacctgaggctcaacgagccccgctacgccacgctgcccaacatcatgaaagccaagaagaagaagatcgaggtgatcaagcctggggacctgggtgtggacctgacctccaagctctctgtgatcagtgtggaggacccgccccagcgcacggccggcgtcaaggtggagaccactgaggacctggtggccaagctgaaggagattgggcggatttgagcccctcccagagatggcaataaaactgactctcaacatcaaaaaaaaaaaaaaaaa

SEQ ID NO: 5594 - protein, 255 aa, Homo sapiens
MAELRVLVAVKRVIDYAVKIRVKPDRTGVVTDGVKHSMNPFCEIAVEEAVRLKEKKLVKEVIAVSCGPAQCQETIRTALAMGADRGIHVEVPPAEAERLGPLQVARVLAKLAEKEKVDLVLLGKQAIDDDCNQTGQMTAGFLDWPQGTFASQVTLEGDKLKVEREIDGGLETLRLKLPAVVTADLRLNEPRYATLPNIMKAKKKKIEVIKPGDLGVDLTSKLSVISVEDPPQRTAGVKVETTEDLVAKLKEIGRI

SEQ ID NO: 5595 - DNA, 3429 bp, Homo sapiens
gtcccgcccacaccgcccgtcccgcttagcccacctggccccgcccactaccgcatcagccttgccccaccctttcagggttcccaaatctggccagtctttctgccctttcccttgcggtcttcccttgtccatacccgtttcctggggatcgctacggaccttaaaataccagcaacagccccttcgccccaagaccatgtagacaaccccactcaggtcgtgttcctgcttaaaacccttactgacctctgcttcggccctgcgccaagtcgagtcctcactcgggaggaggaggcactgcagacagacagtggggagaaggtgaaagagttggagccgcagccgacagagctacgtggtgctgggactgaaagagagggagagagggcagtgggtgacaagcagagtagagggagaaccacagcagggaggaagcctagggagttgggggtgctagagagtgggaacaaaggaggtgtaacagatttgacttgtaaagaattaattatattgactgagagagaagcccagaagaggaagaagaggaaagaaaaggagtcagggatggctcttacacagggacctttgacattcagggatgtagccatagaattctctcaggaggagtggaaatccctggaccctgtgcagaaagctttgtactgggatgtgatgttggagaactacaggaacctggtcttcctgggtatccttcctaaatgtatgaccaaggaattaccaccaatagggaacagtaatacaggagaaaaatgccaaacagtgacgctggaaagacatgaatgttatgatgttgaaaatttttacttaagggaaatccagaaaaatctacaggaccttgagtttcaatggaaagatggtgaaataaattataaagaagtgccaatgacctataaaaacaatcttaatggtaaaagaggtcaacatagtcaagaggatgtagaaaacaaatgtattgaaaatcagcttacattaagctttcagtcacgtctgactgaactgcagaaatttcaaactgaagggaaaatttatgagtgtaaccaatctgagaagacagttaataacagttccctagtttcaccacttcaaagaattcttcctagtgtccaaaccaacatttctaaaaaatatgagaatgagtttttgcagctgtcattacccacccaacttgagaaaacacacattagggaaaaaccttatatgtgtaaagggtgtggcaaagcctttagagtgtcttcaagtcttattaaccatcagatggtacatactacagagaaaccttacaaatgcaatgaatgtggcaaagcctttcatcggggctcactactaactatacatcagatagtccatacaagggggaagccatatcaatgtggtgtatgtggcaagatcttcagacaaaattcagatcttgtaaatcaccggagaagtcacactggagagaaaccgtacaaatgtaatgaatgtggcaagtcctttagtcaaagttataaccttgcaatacatcagagaattcacactggagagaaaccttacaaatgtaatgagtgtgggaaaaccttcaaacaaggctcatgcctcactacacatcagataatccatacaggagagaaaccatatcaatgtgatatatgtggcaaggtcttcaggcagaattctaatcttgtaaatcaccagagaatccacactggagagaaaccatacaaatgcaacatatgtggaaagtcctttagtcaaagttccaacctggcaactcatcagacagttcatagtggaaacaaaccttacaaatgtgatgagtgtggcaaaacctttaaacggagctccagcctcactacacatcagataatccatacaggagagaaaccatatacatgtgatgtatgcgacaaggtcttcagtcaacgttcacaacttgcaaggcaccagagaagtcatactggagagaaaccttacaaatgcaatgaatgtggcaaggtcttcagtcagacttcacatcttgtggggcatcggagaattcatactggagagaaaccttacaaatgtgataaatgtggtaaagcctttaaacagggctcattactcactcgacataagataattcataccagagagaaacgttaccaatgcggtgaatgtggaaaggtctttagtgaaaattcatgccttgtaagacatttaagaattcatactggggagcaaccttacaaatgtaatgtgtgtggcaaggtcttcaattacagtggaaacctttcaattcataagagaatacatacgggagagaaacctttccaatgtaatgaatgtggcacagtcttcaggaactactcatgcctagcacgtcatctaagaattcatactgggcagaaaccttacaaatgtaatgtgtgtggcaaggtcttcaatgacagtggaaacctttcaaatcataagagaattcatactggagagaagccgtttcaatgtaacgaatgcggcaaggttttcagttactactcatgcctagcacgtcatcggaaaattcataccggagagaaaccttacaaatgtaatgattgtggcaaagcctatactcagcgttcaagcctcactaaacatctgataattcatactggagagaaaccttacaattgtaatgagtttggaggggcatttatccaaagttcaaaacttgcaagatatcacagaaatcctactggggagaaaccacacaaatgtagccattgtggtagaacttttagtcatataacaggcctgacgtaccatcagagaaggcatactggagagatgccatacaaatgtattgaatgtggccaggtctttaattccacttcgaaccttgcaaggcatcggagaattcacactggagagaaaccttacaaatgtaatgaatgtggcaaggtctttcgtcatcaatcaacactagcacgtcatcggagtattcatactggagagaaaccttacgtgtgtaatgagtgtggcaaagcctttagagtgcgttcaattctggttaatcatcagaaaatgcatactggggacaaaccttacaaatgtaatgaatgtggtaaagcttttattgaaaggtcaaagctggtgtaccatcaaagaaatcacactggagagaagccatacaaatgtattgaatgtggcaaggcctttgggcggttttcttgcctcaacaaacaccaaatgattcattctggagaaaaaccttataaatgtaatgagtgtggcaaatctttcattagtcgctcaggcctcactaaacatcagacaaaacatactgcagagagtcttaaaacaaaattcaatgtggaaaagcctttagatgttctcctaacttctggtctttaccaaattcatactggagagaaaccttacaaatgtaatcagtgtggtaaaatttaa

SEQ ID NO: 5596 - protein, 189 aa, Homo sapiens
MPYKCIECGQVFNSTSNLARHRRIHTGEKPYKCNECGKVFRHQSTLARHRSIHTGEKPYVCNECGKAFRVRSILVNHQKMHTGDKPYKCNECGKAFIERSKLVYHQRNHTGEKPYKCIECGKAFGRFSCLNKHQMIHSGEKPYKCNECGKSFISRSGLTKHQTKHTAESLKTKFNVEKPLDVLLTSGFK

SEQ ID NO: 5597 - DNA, 2063 bp, Homo sapiens
agcacagcgctggccgcagtctgacaggaaagggacggagccaagatggcggcggccgacggcgacgactcgctgtaccccatcgcggtgctcatagacgaactccgcaatgaggacgttcagcttcgcctcaacagcatcaagaagctgtccaccatcgccttggcccttggggttgaaaggacccgaagtgagcttctgcctttccttacagataccatctatgatgaagatgaggtcctcctggccctggcagaacagctgggaaccttcactaccctggtgggaggcccagagtacgtgcactgcctgctgccaccgctggagtcgctggccacagtggaggagacagtggtgcgggacaaggcagtggagtccttacgggccatctcacacgagcactcgccctctgacctggaggcgcactttgtgccgctagtgaagcggctggcgggcggcgactggttcacctcccgcacctcggcctgcggcctcttctccgtctgctacccccgagtgtccagtgctgtgaaggcggaacttcgacagtacttccggaacctgtgctcagatgacacccccatggtgcggcgggccgcagcctccaagctgggggagtttgccaaggtgctggagctggacaacgtcaagagtgagatcatccccatgttctccaacctggcctctgacgagcaggactcggtgcggctgctggcggtggaggcgtgcgtgaacatcgcccagcttctgccccaggaggatctggaggccctggtgatgcccactctgcgccaggccgctgaagacaagtcctggcgcgtccgctacatggtggctgacaagttcacagagctccagaaagcagtggggcctgagatcaccaagacagacctggtccctgccttccagaacctgatgaaagactgtgaggccgaggtgagggccgcagcctcccacaaggtcaaagagttctgtgaaaacctctcagctgactgtcgggagaatgtgatcatgtcccagatcttgccctgcatcaaggagctggtgtccgatgccaaccaacatgtcaagtctgccctggcctcagtcatcatgggtctctctcccatcttgggcaaagacaacaccatcgagcacctcttgcccctcttcctggctcagctgaaggatgagtgccctgaggtacggctgaacatcatctctaacctggactgtgtgaacgaggtgattggcatccggcagctgtcccagtccctgctccctgccattgtggagctggctgaggacgccaagtggcgggtgcggctggccatcattgagtacatgcccctcctggctggacagctgggagtggagttctttgatgagaaacttaactccttgtgcatggcctggcttgtggatcatgtatatgccatccgcgaggcagccaccagcaacctgaagaagctagtggaaaagtttgggaaggagtgggcccatgccacaatcatccccaaggtcttggccatgtccggagaccccaactacctgcaccgcatgactacgctcttctgcatcaatgtgctgtctgaggtctgtgggcaggacatcaccaccaagcacatgctacccacggttctgcgcatggctggggacccggttgccaatgtccgcttcaatgtggccaagtctctgcagaagatagggcccatcctggacaacagcaccttgcagagtgaagtcaagcccatcctagagaagctgacccaggaccaggatgtggacgtcaaatactttgcccaggaggctctgactgttctgtctctcgcctgatgctggaagaggagcaaacactggcctctggtgtccaccctccaacccccacaagtccctctttggggagacactggggggcctttggctgtcactccctgtgcatggtctgaccccaggccccttcccccagcacggttcctcctctccccagcctgggaagatgtctcactgtccacctcccaacgggctaggggagcacggggttggacaggacagtgaccttgggaggaaggggctactccgcc

SEQ ID NO: 5598 - DNA, 2874 bp, Homo sapiens
gcaagaccttcagtcaaacgtcataccttgtgtaccatcgtagacttcatactggagagaaaccttacaaatgtgaagaatgtgacaaagctttcagtttcaaatcaaaccttgaaagacataggaaaattcatactggagagaaaccttacaagtgtaatgaatgcagcaggacctttagtcggaagtcatcccttacacgccatcgtagacttcatactggagagaaaccttataagtgtaatgattgtggcaagaccttcagtcagatgtcatcccttgtataccatcgtagacttcatactggagagaaaccttacaaatgtgaagaatgtgatgaagctttcagtttcaaatcgaaccttgaaagacataggagaattcatactggagagaaaccttacaagtgtaatgattgtggcaagaccttcagtcagacatcatcccttgtataccatcgtagacttcatactggagagaaaccttacaaatgtgaagaatgtgatgaagctttcagtttcaaatcaaaccttgaaagacataggataattcatactggagagaaactttacaagtgtaatgaatgtggcaagacctttagtcggaagtcatcccttacacgccattgtagacttcatactggagagaaaccttaccagtgtaatgagtgtggcaaagcctttcgtgggcagtcagcacttatttaccatcaagcaatccatggtatagggaaactttacaaatgtaatgattgtcaccaagtctttagtaatgctacaaccattgcaaatcattggagaatccataatgaagagagatcgtacaagtgtaatagatgtggcaaatttttcagacatcgttcataccttgcagttcattggcgaactcatagtggagagaaaccttacaaatgtgaagaatgtgatgaagctttcagtttcaaatcaaaccttcaaagacataggagaattcatactggagagaaaccttacaggtgtaatgaatgtggcaagacctttagtcggaagtcataccttacatgccatcgtagacttcatactggagagaaaccttacaagtgtaatgagtgtggcaagaccttcggtcgaaattcagcccttataattcacaaggcaattcatactggagagaaaccttacaagtgtaatgagtgtggcaaggccttcagtcagaagtcatcccttacatgccatcttagacttcatactggagagaaaccttacaaatgtgaagaatgtgacaaagttttcagtcgcaaatcaagccttgaaaaacacaggagaattcatactggagagaaaccatacaaatgtaaggtttgtgacaaagcttttgggcgtgattcacacctggcacaacatactagaattcacactggagagaaaccttacaagtgtaatgaatgtggcaagaacttccgtcacaattcagcccttgtaattcataaggcaattcatagtggagagaaaccttacaagtgtaatgagtgtggcaagaccttccgtcacaattcagcccttgaaattcataaggcaattcatactggagaaaaaccttacaagtgtagtgaatgtggcaaggtttttaatagaaaagcaaacctttcacgtcatcatagacttcatactggagagaaaccttacaagtgtaataaatgtggtaaggtttttaatcaacaagcacaccttgcatgtcatcatagaattcatactggagagaaaccttacaagtgtaatgagtgtggcaaaaccttccgtcacaattcagtccttgtaattcataagacaattcatactggagagaaaccttacaagtgtaatgaatgtggcaaggtttttaatcgaaaagcaaaacttgcacgtcatcatagaattcatactggaaagaaacattagaaatatgaagaatgtgacaaagtttacagttgtaaatcaagtcttgaaagacaggagaattcatactggagagaaagcttacaaatgtaagagtttgtgacaagaatcttgggcgtgattcacacctggcccaacaaactagaagtcacactggagagaaaccttacaagtgtactgagtgtggcaaagcctttagtgggcagtcaacacttattcaccatcaggcaatccatggtatagggaaactttactaatgtaatgattatcacaaagtcttcagtaacactacaaccgtttcaaatcattggagaatccataatgagagattttgaaagtgtaataaatgtggcaaatttttcagacattgttcataccttgcagttcatcggtgaactcatgctggagagaaaccttacaaatgtcatgattgtggcaaggtcttcagtctagcttcatcttatgcaaaacaggagacttcatacaggagacaaacttcacaagtatgatgattgcagcaaagcctttacttcacgttcacacctaattagacatcagagaatccatactggacagaaatcttacaaatgtcatcagtgtggcaaggtcttcagtctgagatcaccccttaaggaacatcagaaaattcatttttgagatgattgttccaaatgcaatgagtatagcaaaccatcaagcattaattggcattagagtcaattcagcattgacttgagtttgaattgacttaacattgagttcaagcattaattgacattaaagtgtttatgttaagaagattgggccaggcggggtggctcacgcctgtaatcccagcactttgggaggccaagaccaatagatcacttgaggtcaggagtttgagaccagactggccaacagacatgagtcacttttcccaccctgtattttgtttctttaataaaaactgttacgggtt

SEQ ID NO: 5599 - protein, 548 aa, Homo sapiens
MSSLVYHRRLHTGEKPYKCEECDEAFSFKSNLERHRRIHTGEKPYKCNDCGKTFSQTSSLVYHRRLHTGEKPYKCEECDEAFSFKSNLERHRIIHTGEKLYKCNECGKTFSRKSSLTRHCRLHTGEKPYQCNECGKAFRGQSALIYHQAIHGIGKLYKCNDCHQVFSNATTIANHWRIHNEERSYKCNRCGKFFRHRSYLAVHWRTHSGEKPYKCEECDEAFSFKSNLQRHRRIHTGEKPYRCNECGKTFSRKSYLTCHRRLHTGEKPYKCNECGKTFGRNSALIIHKAIHTGEKPYKCNECGKAFSQKSSLTCHLRLHTGEKPYKCEECDKVFSRKSSLEKHRRIHTGEKPYKCKVCDKAFGRDSHLAQHTRIHTGEKPYKCNECGKNFRHNSALVIHKAIHSGEKPYKCNECGKTFRHNSALEIHKAIHTGEKPYKCSECGKVFNRKANLSRHHRLHTGEKPYKCNKCGKVFNQQAHLACHHRIHTGEKPYKCNECGKTFRHNSVLVIHKTIHTGEKPYKCNECGKVFNRKAKLARHHRIHTGKKH

SEQ ID NO: 5600 - DNA, 1834 bp, Homo sapiens
agaaacagtggtgcgcggagaggagaggcctcgggatgtctctggcagatgagctcttagctgatctcgaagaggcagcagaagaggaggaaggaggaagctatggggaggaagaagaggagccagcgatcgaggatgtgcaggaggagacacagctggatctttccggggattcagtcaagaccatcgccaagctatgggatagtaagatgtttgctgagattatgatgaagattgaggagtatatcagcaagcaagccaaagcttcagaagtgatgggaccagtggaggccgcgcctgaataccgcgtcatcgtggatgccaacaacctgaccgtggagatcgaaaacgagctgaacatcatccataagttcatccgggataagtactcaaagagattccctgaactggagtccttggtccccaatgcactggattacatccgcacggtcaaggagctgggcaacagcctggacaagtgcaagaacaatgagaacctgcagcagatcctcaccaatgccaccatcatggtcgtcagcgtcaccgcctccaccacccaggggcagcagctgtcggaggaggagctggagcggctggaggaggcctgcgacatggcgctggagctgaacgcctccaagcaccgcatctacgagtatgtggagtcccggatgtccttcatcgcacccaacctgtccatcattatcggggcatccacggccgccaagatcatgggtgtggccggcggcctgaccaacctctccaaggtgcccgcctgcaacatcatgctgctcggggcccagcgcaagacgctgtcgggcttctcgtctacctcagtgctgccccacaccggctacatctaccacagtgacatcgtgcagtccctgccaccggatctgcggcggaaagcggcccggctggtggccgccaagtgcacactggcagcccgtgtggacagtttccacgagagcacagaagggaaggtgggctacgaactgaaggatgagatcgagcgcaaattcgacaagtggcaggagccgccgcctgtgaagcaggtgaagccgctgcctgcgcccctggatggacagcggaagaagcgaggcggccgcaggtaccgcaagatgaaggagcggctggggctgacggagatccggaagcaggccaaccgtatgagcttcggagagatcgaggaggacgcctaccaggaggacctgggattcagcctgggccacctgggcaagtcgggcagtgggcgtgtgcggcagacacaggtaaacgaggccaccaaggccaggatctccaagacgctgcagcggaccctgcagaagcagagcgtcgtatatggcgggaagtccaccatccgcgaccgctcctcgggcacggcctccagcgtggccttcaccccactccagggcctggagattgtgaacccacaggcggcagagaagaaggtggctgaggccaaccagaagtatttctccagcatggctgagttcctcaaggtcaagggcgagaagagtggccttatgtccacctgaatgactgcgtgtgtccaaggtggcttcccactgaagggacacagaggtccagtccttctgaagggctaggatcgggttctggcagggagaacctgccctgccactggccccattgctgggactgcccagggaggaggccttggaagagtccggcctggcttcccccaggaccgagatcaccgcccagtatgggctagagcaggtcttcatcatgccttgtcttttttaactgagaaaggagattttttgaaaagagtacaattaaaaggacattgtcaagaaaaaaaaaaaaaaaaaaa

SEQ ID NO: 5601 - protein, 499 aa, Homo sapiens
MSLADELLADLEEAAEEEEGGSYGEEEEEPAIEDVQEETQLDLSGDSVKTIAKLWDSKMFAEIMMKIEEYISKQAKASEVMGPVEAAPEYRVIVDANNLTVEIENELNIIHKFIRDKYSKRFPELESLVPNALDYIRTVKELGNSLDKCKNNENLQQILTNATIMVVSVTASTTQGQQLSEEELERLEEACDMALELNASKHRIYEYVESRMSFIAPNLSIIIGASTAAKIMGVAGGLTNLSKVPACNIMLLGAQRKTLSGFSSTSVLPHTGYIYHSDIVQSLPPDLRRKAARLVAAKCTLAARVDSFHESTEGKVGYELKDEIERKFDKWQEPPPVKQVKPLPAPLDGQRKKRGGRRYRKMKERLGLTEIRKQANRMSFGEIEEDAYQEDLGFSLGHLGKSGSGRVRQTQVNEATKARISKTLQRTLQKQSVVYGGKSTIRDRSSGTASSVAFTPLQGLEIVNPQAAEKKVAEANQKYFSSMAEFLKVKGEKSGLMST

SEQ ID NO: 5602 - DNA, 2529 bp, Homo sapiens
gttctcgactattgccgaagtgagccgaagtttgtggccccgcttccggagaactcaagctcccgattgtgcccgaaggaacccgaagggagaccccgcctcattcctcacggcgagctccagaccccgcctcctttccggagcccgtctgttccccttcgggtccaaagcttttggctcctccttgttccgagcccgaaggcccgccccttcacgtactcggagctcggatcccagtgtggacctggactcgaatcccgttgccgactcgcgctctcggcttctgctccggggcttcttccctgcccgcccggggccctgaccgtggcttcttccccggcctgatctgcgcagcccggcgggcgcccagaaggagcaggcggcgcgggggcgcgctgggcgggggaggcgtggccggagctgcggcggcaagcgggctgggactgctcggccgcctcctgcccggcgagcagctcagaccatgtcgcctgaagaatggacgtatctagtggttcttcttatctccatccccatcggcttcctctttaagaaagccggtcctgggctgaagagatggggagcagccgctgtgggcctggggctcaccctgttcacctgtggcccccacactttgcattctctggtcaccatcctcgggacctgggccctcattcaggcccagccctgctcctgccacgccctggctctggcctggactttctcctatctcctgttcttccgagccctcagcctcctgggcctgcccactcccacgcccttcaccaatgccgtccagctgctgctgacgctgaagctggtgagcctggccagtgaagtccaggacctgcatctggcccagaggaaggaaatggcctcaggcttcagcaaggggcccaccctggggctgctgcccgacgtgccctccctgatggagacactcagctacagctactgctacgtgggaatcatgacaggcccgttcttccgctaccgcacctacctggactggctggagcagcccttccccggggcagtgcccagcctgcggcccctgctgcgccgcgcctggccggccccgctcttcggcctgctgttcctgctctcctctcacctcttcccgctggaggccgtgcgcgaggacgccttctacgcccgcccgctgcccgcccgcctcttctacatgatccccgtcttcttcgccttccgcatgcgcttctacgtggcctggattgccgccgagtgcggctgcattgccgccggctttggggcctaccccgtggccgccaaagcccgggccggaggcggccccaccctccaatgcccaccccccagcagtccggagaaggcggcttccttggagtatgactatgagaccatccgcaacatcgactgctacagcacagatttctgcgtgcgggtgcgcgatggcatgcggtactggaacatgacggtgcagtggtggctggcgcagtatatctacaagagcgcacctgcccgttcctatgtcctgcggagcgcctggaccatgctgctgagcgcctactggcacggcctccacccgggctactacctgagcttcctgaccatcccgctgtgcctggctgccgagggccggctggagtcagccctgcgggggcggctgagcccagggggccagaaggcctgggactgggtgcactggttcctgaagatgcgcgcctatgactacatgtgcatgggcttcgtgctgctctccttggccgacacccttcggtactgggcctccatctacttctgtatccacttcctggccctggcagccctggggctggggctggctttaggtgggggcagccccagccggcggaaggcagcatcccagcccaccagccttgccccagagaagctccgggaggagtaagctgtcacgacgctccctctgccagctggtcccgggaattctgtgaaccaggctgctgtctcctccccagaaagagtccttaccttggagagggtcctggagagaatttcctcttccccagctaaataccctgcctgcaactgaagcagacccgggggtgtcctccctgccctctgcccagaggccacctccactcctacaaaatcaaagtattgtccagacaagagtcactggcccctgctccagcttctgggtatccagagagcactgcacttccccaaaacggaaggggcccctgggcagtgggttttgggcaaattccctttctttgcatccacaatgtggggtcggagcttgggggcaggtcctgggagtgggaagcctcttccttgtgtctttcgctccacttttagctcatcgcaccaatattgcagacttggaaggaagcataagcttcccatttcacaaaggggaaactgaggtgcgggtgcgcgggcctggggacggccgtcccatggcttccatctgagccacctcgggaccccagcgctcctggcgccctcttctcatcgcttggcctatgacaggtcaccgtgtgtaaatctttcccaataaagtgttgcacaaag

SEQ ID NO: 5603 - DNA, 688 bp, Homo sapiens
cccgcgcaggcgcagacggggaagcggagccaacatgccagtggcccggagctgggtttgtcgcaaaacttatgtgaccccgcggagacccttcgagaaatctcgtctcgaccaagagctgaagctgatcggcgagtatgggctccggaacaaacgtgaggtctggagggtcaaatttaccctggccaagatccgcaaggccgcccgggaactgctgacgcttgatgagaaggacccacggcgtctgttcgaaggcaacgccctgctgcggcggctggtccgcattggggtgctggatgagggcaagatgaagctggattacatcctgggcctgaagatagaggatttcttagagagacgcctgcagacccaggtcttcaagctgggcttggccaagtccatccaccacgctcgcgtgctgatccgccagcgccatatcagggtccgcaagcaggtggtgaacatcccgtccttcattgtccgcctggattcccagaagcacatcgacttctctctgcgctctccctacgggggtggccgcccgggccgcgtgaagaggaagaatgccaagaagggccagggtggggctggggctggagacgacgaggaggaggattaagtccacctgtccctcctgggctgctggattgtctcgttttcctgccaaataaacaggatcagcgcttta

SEQ ID NO: 5604 - protein, 194 aa, Homo sapiens [sequence omitted]

SEQ ID NO: 5605 - DNA, 526 bp, Homo sapiens
ccgaagggagaccccgcctcattcctcacggcgagctccagaccccgcctcctttccggagcccgtctgttccccttcgggtccaaagcttttggctcctccttgttccgagcccgaaggcccgccccttcacgtactcggagctcggatcccagtgtggacctggactcgaatcccgttgccgactcgcgctctcggcttctgctccggggcttcttccctgcccgcccggggccctgaccgtggcttcttccccggcctgatctgcgcagcccggcgggcgcccagaaggagcaggcggcgcgggggcgcgctgggcgggggaggcgtggccggagctgcggcggcaagcgggctgggactgctcggccgcctcctgcccggcgagcagctcaggtcctgggctgaagagatggggagcagccgctgtgggcctggggctcaccctgttcacctgtggcccccacactttgcattctctggtcaccatcctcgggacctgggccctcattcaggcccagccctg

SEQ ID NO: 5606 - protein, 144 aa, Homo sapiens
LAPPCSEPEGPPLHVLGARIPVWTWTRIPLPTRALGFCSGASSLPARGPDRGFFPGLICAARRAPRRSRRRGGALGGGGVAGAAAASGLGLLGRLLPGEQLRSWAEEMGSSRCGPGAHPVHLWPPHFAFSGHHPRDLGPHSGPA

SEQ ID NO: 5607 - DNA, 582 bp, Homo sapiens
aggcgcagacggggaagcggagccaacatgccagtggcccggagctgggtttgtcgcaaaacttatgtgaccccgcggagacccttcgagaaatctcgtctcgaccaagagctgaagctgatcggcgagtatgggctccggaacaaacgtgaggtctggagggtcaaatttaccctggccaagatccgcaaggccgcccgggaactgctgacgcttgatgagaaggacccacggcgtctgttcgaaggcaacgccctgctgcggcggctggtccgcattggggtgctggatgagggcaagatgaagctggattacatcctgggcctgaagatagaggatttcttagagagacgcctgcagacccaggtcttcaagctgggcttggccaagtccatccaccacgctcgcgtgctgatccgccagcgccatatcagggtccgcaagcaggtggtgaacatcccgtccttcattggccgcgtgaagaggaagaatgccaagaagggccagggtggggctggggctggagacgacgaggaggaggattaagtccacctgtccctcctgggctgctggattgtctcg

SEQ ID NO: 5608 - DNA, 1018 bp, Homo sapiens
ggcacgaggctcaagattcacagcatctcagacgcagcctaggttcccatggacttgtcataagacaaaagaggacagctgtgctgagggggcagggtctgcagcctcctggctgtgccaggaccacacctaccaaggccgcaccaggatgtcggacaccgaggagcaggaatatgaggaggagcagccggaagaggaggctgcggaggaggaggaggaagaagaggaacgccccaaaccaagccgccccgtggtgcctcctttgatcccgccaaagatcccagaaggggagcgcgttgacttcgatgacatccaccgcaagcgcatggagaaagacctgctggagctgcagacactcatcgatgtacatttcgagcagcggaagaaggaggaagaggagctggttgccttgaaggagcgcattgagcggcgccggtcagagagagccgagcaacagcgcttcagaactgagaaggaacgcgaacgtcaggctaagctggcggaggagaagatgaggaaggaagaggaagaggccaagaagcgggcagaggatgatgccaagaaaaagaaggtgctgtccaacatgggggcccattttggcggctacctggtcaaggcagaacagaagcgtggtaagcggcagacggggcgggagatgaaggtgcgcatcctctccgagcgtaagaagcctctggacattgactacatgggggaggaacagctccgggagaaagcccaggagctgtcggactggatccaccagctggagtctgagaagttcgacctgatggcgaagctgaaacagcagaaatatgagatcaacgtgctgtacaaccgcatcagccacgcccagaagttccggaagggggcagggaagggccgcgttggaggccgctggaagtgaggatgccgccccggacagtggcacctgggaagcctgggagtgtttgtcccatcggtagcttgaaataaacgctcccctcagacactcaaaaaaaaaaaaaaaaaaaaaaaaaaa

SEQ ID NO: 5609 - protein, 251 aa, Homo sapiens
MSDTEEQEYEEEQPEEEAAEEEEEEEERPKPSRPVVPPLIPPKIPEGERVDFDDIHRKRMEKDLLELQTLIDVHFEQRKKEEEELVALKERIERRRSERAEQQRFRTEKERERQAKLAEEKMRKEEEEAKKRAEDDAKKKKVLSNMGAHFGGYLVKAEQKRGKRQTGREMKVRILSERKKPLDIDYMGEEQLREKAQELSDWIHQLESEKFDLMAKLKQQKYEINVLYNRISHAQKFRKGAGKGRVGGRWK

SEQ ID NO: 5610 - DNA, 3781 bp, Homo sapiens
cgcccagctaatttttgtatttttggtagagacagggtttcgccatgttgcccaggctggtcttgaacttctgacctcaagtgatatgcctgcctcagcctcccaaggggtacctccccacagtcctggagcagactgtggcccctcagggccttgagtggcacgctggtggggcagctcttgtcttggagccgtcaggcaccgtgtgaaagtttggaggagggaggcaggaggtgaggttggaagttgagcaaggttccaggagtcagccggagctggggcagcatacggggttgcaagtgaagccgctgagaggcaaaagggatgagtgttagctgctgtgggattgggaagcgcaggagcttcaggaccagcttgtcttgggggtggtaaggagcctaggatgggatggttgggtgttagcagggtggaggaggcctggtgtgggcccttgtttctgcgtcaccctgtcctctgccctttccccttcctggacaggggtctctgcagttcccagaaacccagtgcccggtgcagagaagagggtggagccttgccgccccctgcccccggcctccgacccgagcccccacccgcctgtgcttgcctcccaggtaccccagtgtggcctgcgagattctgacctcagatgtgccccagatcaatgatgccctgggtgccgatgagtcccttctgaaccggctctacggcttcctgcagagcaccggcagcctcaacccactgctggccagcttcttcagcaaggtcatgggcatcctcatcaaccgcaagacagaccagctcgtgtcctttcttcggaagaaggatgacttcgtggacctgctgctgcagcacattggcacctcggccatcatggacctcctgctgcgcctgctcacctgtgtggagcggcctcagctgaggcaggatgttgtcaattggctcaacgaggagaagatcgtccagcggctgattgagcagatccacccgtcgaaggatgagaatcaacattccaacgcatcccagtccctgtgtgacatcatccgcctgagccgggagcagatgatccaagtccaggacagcccagagcctgaccaactgctggccaccctggagaagcaggagacgattgagcagctcttaagcaacatgttcgagggggagcagagccagtctgtcatcgtcagtgggatccaggtgctgctgaccctgctggagcccaggaggccgaggtccgagtccgtgaccgtgaacagcttcttcagcagtgtggatgggcagctggagctcctggcccagggggccctggaaagcactgtgtccagtgtgggcgccttgcacgccctacgcccgcggctcagctgcttccaccagctcctgctggagcctcccaagctggagccgctacagatgacatggggcatgctggctccgcctctgggcaacacgcggctgcacgtggtcaagctcctggccagtgccctgagcgccaatgatgcagccctgacgcacgagctcctggcactggacgtgcccaacaccatgctggacctcttcttccattatgtcttcaacaacttcttgcatgcccaagtagagggatgcgtgagcaccatgctgagcttggggccacctcctgacagcagccctgagacgcccatccaaaaccctgttgtgaaacatctgctgcagcagtgccgcctggtggagcggatcctgacgtcctgggaggagaacgaccgtgtacagtgtgcgggaggccctcggaaaggctacatgggtcacctgacaagagtggccggtgccctggtgcagaacacggagaaggggcccaatgcagagcagctgcggcagctgctgaaggagctgcccagcgagcagcaggagcagtgggaagccttcgtatcggggcccctggcggagaccaacaagaagaacatggtggacctggtgaacacccaccacctacactcctccagtgacgatgaggacgaccggctcaaggagttcaacttccctgaggaggctgtgctgcagcaggccttcatggacttccagatgcagcgcatgacctctgccttcattgaccacttcggcttcaatgatgaggagtttggggagcaggaggagagtgtgaacgcaccttttgacaagacagccaacatcaccttctccctcaatgctgacgatgagaaccccaacgccaacctacttgagatatgctacaaggaccgcatccagcagtttgatgatgatgaggaagaggaggacgaggaagaggcccagggctcaggggagtctgatggagaagatggcgcctggcagggcagccagctggccaggggggcccgtctgggccagccacctggtgtccggagtggaggcagcacagacagtgaggacgaagaagaggaggacgaggaggaggaggaagacgaggagggcattggctgtgcagcccgtggaggggccacccctctgtcctaccccagccctggccctcagcctccaggccccagctggacagccacctttgacccagtgcctacagatgccccgaccagcccccgagtctccggggaggaagagctgcacactgggcctccagccccacaggggcccctcagtgtgccccagggcctccccactcagagcctggccagccctcctgcccgtgacgccctgcagctcaggtctcaggaccccacacccccctcagcacctcaggaagccacagaaggcagcaaagtcacggagccctcagccccttgccaggccttggttagcatcggggaccttcaggccaccttccacgggatccgttctgcccccagctcctcggacagtgcaaccagagacccctctacctctgtcccagcctccggggcccaccagcccccccagaccacagaaggggagaagagcccagagcccttggggcttccccaaagccagagtgcccaggccctcacgcctcctccgatacccaatggctctgccccggaagggcctgcatcctcaggctcccaatagctgcctggtgcggcagcggcggccaaatcttccgtcctcccgtggatctcccggggtgggggcagggcgggtcccacgatggcccccattgccctcatcaccctgacacccccacattctctcctctggacccccaggaggctggtgccagggagacaggcccaacccacccccatttgcactgagaagagaagttttggagcgttgcctcctagaataaagatacagagagtcaaatagagagaatggagagagagaaacatatattatatattatatagagagagggaggagagcgagagagagtgaggacaccgaactgggctggcggctccaaagcacagccttccctgttccgtcccagcgggagctggtgttaggggtcccaaggttgccacccacgtgcccagctgtcccacgctgcagcgcagacggccacgcccacacccggccttttagctcaggtccaccatgggggacggcccagcgtgggtgggggtgccagagggtcccgagtgggggccgtgcctttgcccagaccctgcactttcaaccaggccagtccggctctggggagcaggggcctccccggcaacagccccaggggccttgagggtctgaggtcccagccctgttgccaagtgaccttgtccccagctccctcctcccaggctggtgtgagtgtgcgtgcgtttgtgccgagcttctatttcatattgcaaatataaataaaggaaggcagtttacg

SEQ ID NO: 5611 - protein, 754 aa, Homo sapiens
MGILINRKTDQLVSFLRKKDDFVDLLLQHIGTSAIMDLLLRLLTCVERPQLRQDVVNWLNEEKIVQRLIEQIHPSKDENQHSNASQSLCDIIRLSREQMIQVQDSPEPDQLLATLEKQETIEQLLSNMFEGEQSQSVIVSGIQVLLTLLEPRRPRSESVTVNSFFSSVDGQLELLAQGALESTVSSVGALHALRPRLSCFHQLLLEPPKLEPLQMTWGMLAPPLGNTRLHVVKLLASALSANDAALTHELLALDVPNTMLDLFFHYVFNNFLHAQVEGCVSTMLSLGPPPDSSPETPIQNPVVKHLLQQCRLVERILTSWEENDRVQCAGGPRKGYMGHLTRVAGALVQNTEKGPNAEQLRQLLKELPSEQQEQWEAFVSGPLAETNKKNMVDLVNTHHLHSSSDDEDDRLKEFNFPEEAVLQQAFMDFQMQRMTSAFIDHFGFNDEEFGEQEESVNAPFDKTANITFSLNADDENPNANLLEICYKDRIQQFDDDEEEEDEEEAQGSGESDGEDGAWQGSQLARGARLGQPPGVRSGGSTDSEDEEEEDEEEEEDEEGIGCAARGGATPLSYPSPGPQPPGPSWTATFDPVPTDAPTSPRVSGEEELHTGPPAPQGPLSVPQGLPTQSLASPPARDALQLRSQDPTPPSAPQEATEGSKVTEPSAPCQALVSIGDLQATFHGIRSAPSSSDSATRDPSTSVPASGAHQPPQTTEGEKSPEPLGLPQSQSAQALTPPPIPNGSAPEGPASSGSQ

SEQ ID NO: 5612 - DNA, 1515 bp, Homo sapiens
gcggcgcccagcagagtcaggtgcggacgactttgtctgtaggagcagcggcggcttgaggacccggggagaccctcaagaatcgacccatcaggacgccagagctgcttcagcggtgaccaccttctccctctaacacattcttcccttcttcacaaacggcccatgtcagacgaaggctcaagggggagccgcctgcccctggcgctgcccccggcctcccagggttgctcttcagggggcggcggcggcggcggcggcggctcctcggctgggggctcgggcaattcccggcccccacgcaacctccaaggcttgctgcagatggccatcaccgcgggctctgaagagccagaccctcctccagaaccgatgagtgaggagaggcgtcagtggctgcaggaggccatgtcggctgccttccgaggccagcgggaggaggtggagcagatgaagagctgcctccgagtgctgtcacagcccatgccccccactgctggggaggccgagcaggcggccgaccagcaagagcgagagggggccctggagctgctggccgacctgtgtgagaacatggacaatgccgcagacttctgccagctgtctggcatgcacctgctggtgggccggtacctggaggcgggggctgcgggactgcggtggcgggcggcacagctcatcggcacgtgcagtcagaacgtggcagccatccaggagcaggtgctgggcctgggtgccctgcgtaagctgctgcggctgctggaccgcgacgcctgcgacacggtgcgcgtcaaggccctcttcgccatctcctgtctggtccgagagcaggaggctgggctgctgcagttcctccgcctggacggcttctctgtgttgatgagggccatgcagcagcaggtgcagaagctcaaggtcaaatcagcattcctgctgcagaacctgctggtgggccaccctgaacacaaagggaccctgtgctccatggggatggtccagcagctggtggccctggtgcggacagagcacagccccttccacgagcacgtgcttggagccctgtgcagcctggtgacagactttccgcagggtgtgcgcgagtgtcgggagccggaactgggcctggaggagctcctccgccaccgctgtcagctgctgcagcagcatgaggagtaccaggaggagctggagttctgtgaaaagctgctacagacctgtttctccagcccagcggacgacagcatggatcggtgaaaccaggtggcttcttgcccccttctccgtgggaaccccaggcctcttgcctccctccccacctacaaggccctctcccaagggatcgcagggcctaggtgcctggacccagggtgtgccagcccgtctctgtgcagtccctggaaggggcgctgagaaaggcaccagctccttggaccccacctcccatgctctcactctcatccccgttctcttgtccacacagctcttccaataaaggtgtttctcttcctccttctc

SEQ ID NO: 5613 - DNA, 500 bp, Homo sapiens
ctctttccgtctcaggtcgccgctgcgaagggagccgccgccatgtctgcgcatctgcaatggatggtcgtgcggaactgctccagtttcctgatcaagaggaataagcagacctacagcactgagcccaataacttgaaggcccgcaattccttccgctacaacggactgattcaccgcaagactgtgggcgtggagccggcagccgacggcaaaggtgtcgtggtggtcattaagcggagatccggccagcggaagcctgccacctcctatgtgcggaccaccatcaacaagaatgctcgcgccacgctcagcagcatcagacacatgatccgcaagaacaagtaccgccccgacctgcgcatggcagccatccgcagggccagcgccatcctgcgcagccagaagcctgtgatggtgaagaggaagcggacccgccccaccaagagctcctgagccccctgcccccagagcaataaagtcagctggctttctcaaaa

SEQ ID NO: 5614 - protein, 137 aa, Homo sapiens [sequence omitted]

SEQ ID NO: 5615 - DNA, 890 bp, Homo sapiens
ggcggaccgaagaacgcaggaagggggccggggggacccgcccccggccggccgcagccatgaactccaacgtggagaacctacccccgcacatcatccgcctggtgtacaaggaggtgacgacactgaccgcagacccacccgatggcatcaaggtctttcccaacgaggaggacctcaccgacctccaggtcaccatcgagggccctgaggggaccccatatgctggaggtctgttccgcatgaaactcctgctggggaaggacttccctgcctccccacccaagggctacttcctgaccaagatcttccacccgaacgtgggcgccaatggcgagatctgcgtcaacgtgctcaagagggactggacggctgagctgggcatccgacacgtactgctgaccatcaagtgcctgctgatccaccctaaccccgagtctgcactcaacgaggaggcgggccgcctgctcttggagaactacgaggagtatgcggctcgggcccgtctgctcacagagatccacgggggcgccggcgggcccagcggcagggccgaagccggtcgggccctggccagtggcactgaagcttcctccaccgaccctggggccccagggggcccgggaggggctgagggtcccatggccaagaagcatgctggcgagcgcgataagaagctggcggccaagaaaaagacggacaagaagcgggcgctgcgggcgctgcggcggctgtagtgggctctcttcctccttccaccgtgaccccaacctctcctgtcccctccctccaactctgtctctaagttatttaaattatggctggggtcggggagggtacagggggcactgggacctggatttgtttttctaaataaagttggaaaagca

SEQ ID NO: 5616 - protein, 225 aa, Homo sapiens
MNSNVENLPPHIIRLVYKEVTTLTADPPDGIKVFPNEEDLTDLQVTIEGPEGTPYAGGLFRMKLLLGKDFPASPPKGYFLTKIFHPNVGANGEICVNVLKRDWTAELGIRHVLLTIKCLLIHPNPESALNEEAGRLLLENYEEYAARARLLTEIHGGAGGPSGRAEAGRALASGTEASSTDPGAPGGPGGAEGPMAKKHAGERDKKLAAKKKTDKKRALRALRRL

SEQ ID NO: 5617 - DNA, 2620 bp, Homo sapiens
aattctttcatttcagagttgagcaaactgtgtctcaaggaggtgtgcgctgcaggtagctgatgtggccaggatttgaacccacattttatattctttgccattagattccatttttcttatctcttatttctcagcgccaggtctctttttgtttctgggcctctttcttccttggcctcctgcctccctgtcttcccatgttcttgtatctgctgctgcctgtgtttttctcattgtgtctctgcctagctccctctgcccaggtttctatgtgtctctttctgtcagaactgtcttctatttcttctcagtccccttctctgcatttgttacatcatctcttcatcttaatgtattaggctggggctgttttgggactccagagagttactttttaactagctacatctgtcttcaggtgcctggctttctggcctgaggtggaagcagaggccagcctctctccgtcatccctatctcccctgggcttacatcatggcggggctttgaaaatctccctctgtggcttcttggagccgcatagatgggtgatcagagctggctctggaaccaggctgctccaggagtaaggagcccagtctttgcatgcagtgttgaaaaaggtaatgtccctcttgtgctgagcgagcacctggcacacagcagggacccaggcagtggggctgttaggttccttatctctcctgagccttgggcttccgctatccttgggacgtctggtcttctggcttccccggttcttcctgccgccctggatgcggtgacctgccagcacctgccgcagccttcgtccgggagtcgccccatctctccacgcaatcggccctgtgccccttgctgctgcagccgggcaccatgtcgacctcgtccttgaggcgccagatgaagaacatcgtccacaactactcagaggcggagatcaaggttcgagaggccacgagcaatgacccctggggcccatccagctccctcatgtcagagattgccgacctcacctacaacgttgtcgccttctcggagatcatgagcatgatctggaagcggctcaatgaccatggcaagaactggcgtcacgtttacaaggccatgacgctgatggagtacctcatcaagaccggctcggagcgcgtgtcgcagcagtgcaaggagaacatgtacgccgtgcagacgctgaaggacttccagtacgtggaccgcgacggcaaggaccagggcgtgaacgtgcgtgagaaagctaagcagctggtggccctgctgcgcgacgaggaccggctgcgggaagagcgggcgcacgcgctcaagaccaaggaaaagctggcacagaccgccacggcctcatcagcagctgtgggctcaggcccccctcccgaggcggagcaggcgtggccgcagagcagcggggaggaggagctgcagctccagctggccctggccatgagcaaggaggaggccgaccaggaggagcggatccgtcgcggggatgacctgcggctgcagatggcaatcgaggagagcaagagggagactgggggcaaggaggagtcgtccctcatggaccttgctgacgtcttcacggccccagctcctgccccgaccacagacccctgggggggcccagcacccatggctgctgccgtccccacggctgcccccacctcggacccctggggcggcccccctgtccctccagctgctgatccctggggaggtccagcccccacgccggcctctggggacccctggaggcctgctgcccctgcaggaccctcagttgacccttggggtgggaccccagcccctgcagctggggaggggcccacgcctgatccatggggaagttccgatggtggggtcccggtcagtgggccctcagcctccgatccctggacaccggccccggccttctcagatccctggggagggtcacctgccaagcccagcaccaatggcacaacagcagccgggggattcgacacggagcccgacgagttctctgactttgaccgactccgcacggcactgccgacctccgggagcagcgcaggagagctggagctgctggcaggagaggtgccggcccgaagccctggggcgtttgacatgagtggggtcaggggatctctggctgaggctgtgggcagccccccacctgcagccacaccaactcccacgccccccacccggaagacgccggagtcattcctggggcccaatgcagccctcgtcgacctggactcgctggtgagccggccgggccccacgccgcctggagccaaggcctccaaccccttcctgccaggcggaggcccagccactggcccttccgtcaccaaccccttccagcccgcgcctcccgcgacgctcaccctgaaccagctccgtctcagtcctgtgcctcccgtccctggagcgccacccacgtacatctctccccttggcgggggccctggcctgccccccatgatgcccccgggccccccggcccccaacactaatcccttcctcctataatccagggcggaagggggcctggctccatccggctgccccattccggctccctgggagatcagtgttgtgagtgcatgtgaaatgg

SEQ ID NO: 5618 - protein, 551 aa, Homo sapiens
MSTSSLRRQMKNIVHNYSEAEIKVREATSNDPWGPSSSLMSEIADLTYNVVAFSEIMSMIWKRLNDHGKNWRHVYKAMTLMEYLIKTGSERVSQQCKENMYAVQTLKDFQYVDRDGKDQGVNVREKAKQLVALLRDEDRLREERAHALKTKEKLAQTATASSAAVGSGPPPEAEQAWPQSSGEEELQLQLALAMSKEEADQEERIRRGDDLRLQMAIEESKRETGGKEESSLMDLADVFTAPAPAPTTDPWGGPAPMAAAVPTAAPTSDPWGGPPVPPAADPWGGPAPTPASGDPWRPAAPAGPSVDPWGGTPAPAAGEGPTPDPWGSSDGGVPVSGPSASDPWTPAPAFSDPWGGSPAKPSTNGTTAAGGFDTEPDEFSDFDRLRTALPTSGSSAGELELLAGEVPARSPGAFDMSGVRGSLAEAVGSPPPAATPTPTPPTRKTPESFLGPNAALVDLDSLVSRPGPTPPGAKASNPFLPGGGPATGPSVTNPFQPAPPATLTLNQLRLSPVPPVPGAPPTYISPLGGGPGLPPMMPPGPPAPNTNPFLL

SEQ ID NO: 5619 - DNA, 1707 bp, Homo sapiens
gaggcgaaagctgcacagggccctacgcggccgcctcagcatgtcggacttcgacgagttcgagcggcagctcaacgagaataaacaagagcgggacaaggagaaccggcatcggaagcgcagccacagccgctctcggagccgggaccgcaaacgccggagccggagccgcgaccggcgcaaccgggaccagcggagcgcctcccgggacaggcgacgacgcagcaaacctttgaccagaggcgctaaagaggagcacggtggactgattcgttccccccgccacgagaagaagaagaaggtccgtaaatactgggacgtgccacccccaggctttgagcacatcaccccaatgcagtacaaggccatgcaagctgcgggtcagattccagccactgctcttctccccaccatgacccctgacggtctggctgtgaccccaacgccggtgcccgtggtcgggagccagatgaccagacaagcccggcgcctctacgtgggcaacatcccctttggcatcactgaggaggccatgatggatttcttcaacgcccagatgcgcctgggggggctgacccaggcccctggcaacccagtgttggctgtgcagattaaccaggacaagaattttgcctttttggagttccgctcagtggacgagactacccaggctatggcctttgatggcatcatcttccagggccagtcactaaagatccgcaggcctcacgactaccagccgcttcctggcatgtcagagaacccctccgtctatgtgcctggggttgtgtccactgtggtccccgactctgcccacaagctgttcatcgggggcttacccaactacctgaacgatgaccaggtcaaagagctgctgacatcctttgggcccctcaaggccttcaacctggtcaaggacagtgccacggggctctccaagggctacgccttctgtgagtacgtggacatcaacgtcacggatcaggccattgcggggctgaacggcatgcagctgggggataagaagctgctggtccagagggcgagtgtgggagccaagaatgccacgctggtgagccccccgagcaccatcaatcagacgcctgtgaccctgcaagtgccgggcttgatgagctcccaggtgcagatgggcggccacccgactgaggtcctgtgcctcatgaacatggtgctgcctgaggagctgctggacgacgaggagtatgaggagatcgtggaggatgtgcgggacgagtgcagcaagtacgggcttgtcaagtccatcgagatcccccggcctgtggacggcgtcgaggtgcccggctgcggaaagatctttgtggagttcacctctgtgtttgactgccagaaagccatgcagggcctgacgggccgcaagttcgccaacagagtggttgtcacaaaatactgtgaccccgactcttatcaccgccgggacttctggtagaggcggctgggggagggtgggggcagggctggctgggggcttctccccactcccgcccccccccttatccccctctgaagacgatgggcagaggagtgacagccgcagacacacgacagccggcagcaactggaatggcagcaattaagggtggggagcgggggttggggggttggggggttagggcagggaggggactggggaagtgcgcacacagccccacacagacaacacgcacg

SEQ ID NO: 5620 - protein, 475 aa, Homo sapiens
MSDFDEFERQLNENKQERDKENRHRKRSHSRSRSRDRKRRSRSRDRRNRDQRSASRDRRRRSKPLTRGAKEEHGGLIRSPRHEKKKKVRKYWDVPPPGFEHITPMQYKAMQAAGQIPATALLPTMTPDGLAVTPTPVPVVGSQMTRQARRLYVGNIPFGITEEAMMDFFNAQMRLGGLTQAPGNPVLAVQINQDKNFAFLEFRSVDETTQAMAFDGIIFQGQSLKIRRPHDYQPLPGMSENPSVYVPGVVSTVVPDSAHKLFIGGLPNYLNDDQVKELLTSFGPLKAFNLVKDSATGLSKGYAFCEYVDINVTDQAIAGLNGMQLGDKKLLVQRASVGAKNATLVSPPSTINQTPVTLQVPGLMSSQVQMGGHPTEVLCLMNMVLPEELLDDEEYEEIVEDVRDECSKYGLVKSIEIPRPVDGVEVPGCGKIFVEFTSVFDCQKAMQGLTGRKFANRVVVTKYCDPDSYHRRDFW

SEQ ID NO: 5621 - DNA, 1726 bp, Homo sapiens
gggaaggcatttgagccattttggggtgtatagatgtagtaagacgatgggttccgtagtggggagaggtgactagacttcgaggtgctaagtgtaggaacaggatggaaaagccctagtgaaatgtggggaattgggttagtggggctctggggaggtacctagagaggaagtgagggaggccacggaatatgaagatggggaggccctgcggcatgtagtggggacggagggccaggaggccgatacgggggccggtgggggggtagggggcggcaaagggaggggaagtaaactgaactggggctgggcaacaggaaaaaagaagaaaccacagattagagaaatctcggcggtcaggaggcccggggtctaagatgtaaagaggtaaacagatttagggattgattgtctgctggggtgggttgagaggagaaaagggaagaaaagtcgggggactacgtcctcagacctgacctgagtggtgagaggtggacccaggaggagtggcaggtggtggcggggttttgcagagctcagttggaggccctctccgaggcagcttgatggaacgtgggagagccgggctggagtcacagtttttattttgctagggaggtagtcagtggcgcacaaagggtaacaagcagtgatagtggggatgctttccattttaggaaacttttcctaaaaggaagtggcaattttaactaatctcccctccgccgctcccagctgccactccagatgctgctgctgccgccgcggccaccccaccctcggtcctcctctccggaggccatggacccaccgccccccaaggctccccctttccccaaggcggaaggcccctcctccactccttcctcggcggcggggccccgacccccgcggctgggccgccacctcctcatcgacgccaatggggtcccctacacatacacggtgcagctggaggaggagccccggggcccgccccagcgcgaggcgcccccaggagagcccggccctcgcaagggctacagctgcccggagtgcgcccgtgtctttgccagccctctgcggctgcagagccaccgcgtgtcgcactcggacctcaagcccttcacgtgcggcgcctgcggcaaggccttcaagcgctccagccacctgtcgcggcatcgcgccacgcaccgcgcccgcgccgggccgccgcacacctgcccgctctgcccacgccgcttccaggacgccgcggagctggcgcagcacgtgcgcctccactaagctcgagacccggcctgtgctgccctgcccgtctcagggccaccaagtctgacccacacagcgtcactcactcccacacacaccccctggctctgctgaggttactgccttaccctgggcctcagccccaccttccaaagggaggagcatcattccttccttaccccctttctagctgtgtgatgtagaccaaagtcgttgcccctccctgggcctgggaaccagtcggaactgggttccagtccagctgtgctgtgtgagcctgtgcaagtgacatgacctctctaaaccttggttttctgctctctggagcggtgaaccggtggttgtctgcggggaagagatgataaagagcacgggcacggtctggttcatttctgtatctaccccccttccgcccacgcccccgaccctttgctcaataaacattccgcactccaaaaaaaaaaaaaaaaaaaaa

SEQ ID NO: 5622 - protein, 172 aa, Homo sapiens
MLLLPPRPPHPRSSSPEAMDPPPPKAPPFPKAEGPSSTPSSAAGPRPPRLGRHLLIDANGVPYTYTVQLEEEPRGPPQREAPPGEPGPRKGYSCPECARVFASPLRLQSHRVSHSDLKPFTCGACGKAFKRSSHLSRHRATHRARAGPPHTCPLCPRRFQDAAELAQHVRLH

SEQ ID NO: 5623 - DNA, 1311 bp, Homo sapiens
ccttgtcgaaggaccaaaggcgaccggtgcaggtgcacgacgccagctcccttctggggggccggggcctgggggttgccatggcccccagccacctgtcagtgcgggagatgagggaagatgagaagcccctggtgctggagatgctgaaggccggcgtgaaggacacggaaaaccgcgtggccctccatgccttgacacggccgccggccctgctcctcctggcggcggccagcagcggcctgcgctttgtcctggcttccttcgccctggccctcctcctgccggtgttcctggctgtggccgccgtgaagctgggcctgcgggcccgatggggctcgctgcctccgccgggtggcctggggggcccctgggtggccgtgcggggctccggtgacgtgtgtggggtcctggctctggcccctggcacaaatgcaggggacggggcccgggtcacccgcctgtctgtctctcgctggcaccgccgccggggcgtgggcaggaggctgctggccttcgcggaggcccgggctcgggcctgggctgggggcatgggggagccccgggcccggctcgtggtccccgtggctgtggccgcctggggggtgggagggatgctggagggctgtggctaccaggccgaggggggctggggctgcctgggctacacgctggtgagggaattcagcaaagacctgtgaagctacagactgacagccagggcaggggaggagggaggggcgccagcacctgatgatcgcctactgtctgcgggttcttttacctgctctccctcagtgagtcctcaaccaccctgggcccagaaacagaggcctgccgaggggaggagcctggcctctgtccacccgtcagcagtgtgaagtctgttgtgtttgagcttctcagagtggaatgactccttttccttcctggccctcgggggcctctcgaggtcagcctctccaacccctacctcagctcctgtctgcactgagaaacctccccgggtgatgtctgcaaagtctgtgctgtccgtgccccaggctgggagagctatctggggagggggagaggaggccgagcagaatacaccccagagttagggtttgcgactccgcctccctgggacctggattgggtcagatgcctgtccttggaggggacaaggttgactgcttaggaggcgcgacgcacagggctgccaggcctggcccctctctgggaaggttgagagctgagacgggcagccctgtcccttcctccagatccgtctggttttttacaccgtttgttaataaagcctgaaaccgc

SEQ ID NO: 5624 - protein, 206 aa, Homo sapiens
MAPSHLSVREMREDEKPLVLEMLKAGVKDTENRVALHALTRPPALLLLAAASSGLRFVLASFALALLLPVFLAVAAVKLGLRARWGSLPPPGGLGGPWVAVRGSGDVCGVLALAPGTNAGDGARVTRLSVSRWHRRRGVGRRLLAFAEARARAWAGGMGEPRARLVVPVAVAAWGVGGMLEGCGYQAEGGWGCLGYTLVREFSKDL

SEQ ID NO: 5625 - DNA, 903 bp, Homo sapiens
cggcggcggcgacaggaccgaggggccttagttggtgggcaagtcggggatcccagaaagagaagcgtgacccggaagcggaaacgggtgtccgtcccagctccggcctgccagtgagcttctaccatcatggacctattgttcgggcgccggaagacgccagaggagctactgcggcagaaccagagggccctgaaccgtgccatgcgggagctggaccgcgagcgacagaaactagagacccaggagaagaaaatcattgcagacattaagaagatggccaagcaaggccagatggatgctgttcgcatcatggcaaaagacttggtgcgcacccggcgttatgtgcgcaagtttgtattgatgcgggccaacatccaggctgtgtccctcaagatccagacactcaagtccaacaactcgatggcacaagccatgaagggtgtcaccaaggccatgggcaccatgaacagacagctgaagttgccccagatccagaagatcatgatggagtttgagcggcaggcagagatcatggatatgaaggaggagatgatgaatgatgccattgatgatgccatgggtgatgaggaagatgaagaggagagtgatgctgtggtgtcccaggttctggatgagctgggacttagcctaacagatgagctgtcgaacctcccctcaactgggggctcgcttagtgtggctgctggtgggaaaaaagcagaggccgcagcctcagccctagctgatgctgatgcagacctggaggaacggcttaagaacctgcggagggactgagtgcccctgccactccgagataaccagtggatgcccaggatcttttaccacaacccctctgtaataaaagagatttgacactaaaaaaaaaaaaaaaaaaaaaaa

SEQ ID NO: 5626 - protein, 222 aa, Homo sapiens
MDLLFGRRKTPEELLRQNQRALNRAMRELDRERQKLETQEKKIIADIKKMAKQGQMDAVRIMAKDLVRTRRYVRKFVLMRANIQAVSLKIQTLKSNNSMAQAMKGVTKAMGTMNRQLKLPQIQKIMMEFERQAEIMDMKEEMMNDAIDDAMGDEEDEEESDAVVSQVLDELGLSLTDELSNLPSTGGSLSVAAGGKKAEAAASALADADADLEERLKNLRRD

SEQ ID NO: 5627 - DNA, 2989 bp, Homo sapiens
ggcgcgcgggcgagcggttgtgcttgtgcttgtggcgcgtggtgcgggtttcggcggcggctgaggaagaagcgcgggcggcgccttcgggaggcgagcaggcagcagttggccgtgccgtagcagcgtcccgcgcgcggcgggcagcggcccaggaggcgcgtggcggcgctcggcctcgcggcggcggcggcggcagcggcccagcagttggcggcgagcgcgtctgcgcctgcgcggcgggccccgcgcccctcctccccccctgggcgcccccggcggcgtgtgaatggcggcctccgcggcggcagcctcggcagcagcggcctcggccgcctctggcagcccgggcccgggcgagggctccgctggcggcgaaaagcgctccaccgccccttcggccgcagcctcggcctctgcctcagccgcggcgtcgtcgcccgcggggggcggcgccgaggcgctggagctgctggagcactgcggcgtgtgcagagagcgcctgcgacccgagagggagccccgcctgctgccctgtttgcactcggcctgtagtgcctgcttagggcccgcggcccccgccgccgccaacagctcgggggacggcggggcggcgggcgacggcaccgtggtggactgtcccgtgtgcaagcaacagtgcttctccaaagacatcgtggagaattatttcatgcgtgatagtggcagcaaggctgccaccgacgcccaggatgcgaaccagtgctgcactagctgtgaggataatgccccagccaccagctactgtgtggagtgctcggagcctctgtgtgagacctgtgtagaggcgcaccagcgggtgaagtacaccaaggaccatactgtgcgctctactgggccagccaagtctcgggatggtgaacgtactgtctattgcaacgtacacaagcatgaaccccttgtgctgttttgtgagagctgtgatactctcacctgccgagactgccagctcaatgcccacaaggaccaccagtaccagttcttagaggatgcagtgaggaaccagcgcaagctcctggcctcactggtgaagcgccttggggacaaacatgcaacattgcagaagagcaccaaggaggttcgcagctcaatccgccaggtgtctgacgtacagaagcgtgtgcaagtggatgtcaagatggccatcctgcagatcatgaaggagctgaataagcggggccgtgtgctggtcaatgatgcccagaaggtgactgaggggcagcaggagcgcctggagcggcagcactggaccatgaccaagatccagaagcaccaggagcacattctgcgctttgcctcttgggctctggagagtgacaacaacacagcccttttgctttctaagaagttgatctacttccagctgcaccgggccctcaagatgattgtggatcccgtggagccacatggcgagatgaagtttcagtgggacctcaatgcctggaccaagagtgccgaggcctttggcaagattgtggcagagcgtcctggcactaactcaacaggccctgcacccatggcccctccaagagccccagggcccctgagcaagcagggctctggcagcagccagcccatggaggtgcaggaaggctatggctttgggtcaggagatgatccctactcaagtgcagagccccatgtgtcaggtgtgaaacggtcccgctcaggtgagggcgaggtgagcggccttatgcgcaaggtgccacgagtgagccttgaacgcctggacctggacctcacagctgacagccagccacccgtcttcaaggtcttcccaggcagtaccactgaggactacaaccttattgttattgaacgtggcgctgccgctgcagctaccggccagccagggactgcgcctgcaggaacccctggtgccccacccctggctggcatggccattgtcaaggaggaggagacggaggctgccattggagcccctcctactgccactgagggccctgagaccaaacctgtgcttatggctcttgcggagggtcctggtgctgagggtccccgcctggcctcacctagtggcagcaccagctcagggctggaggtggtggctcctgagggtacctcagccccaggtggtggcccgggaaccctggatgacagtgccaccatttgccgtgtctgccagaagccaggcgatctggttatgtgcaaccagtgtgagttttgtttccacctggactgtcacctgccggccctgcaggatgtaccaggggaggagtggagctgctcactctgccatgtgctccctgacctgaaggaggaggatggcagcctcagcctggatggtgcagacagcactggcgtggtggccaagctctcaccagccaaccagcggaaatgtgagcgtgtactgctggccctattctgtcacgaaccctgccgccccctgcatcagctggctaccgactccaccttctccctggaccagcccggtggcaccctggatctgaccctgatccgtgcccgcctccaggagaagttgtcacctccctacagctccccacaggagtttgcccaggatgtgggccgcatgttcaagcaattcaacaagttaactgaggacaaggcagacgtgcagtccatcatcggcctgcagcgcttcttcgagacgcgcatgaacgaggccttcggtgacaccaagttctctgctgtgctggtggagcccccgccgatgagcctgcctggtgctggcctgagttcccaggagctgtctggtggccctggtgatggcccctgaggctggagcccccatggccagcccagcctggctctgttctctgtcctgtcaccccatccccactcccctggtggcctgactcccactccctggtggccccatcccccagttcctcacgatatggtttttacttctgtggatttaataaaaacttcaccagttaaaaaaaaaaaaaaaaaaaaaaaaaaaaaa

SEQ ID NO: 5628 - protein, 835 aa, Homo sapiens
MAASAAAASAAAASAASGSPGPGEGSAGGEKRSTAPSAAASASASAAASSPAGGGAEALELLEHCGVCRERLRPEREPRLLPCLHSACSACLGPAAPAAANSSGDGGAAGDGTVVDCPVCKQQCFSKDIVENYFMRDSGSKAATDAQDANQCCTSCEDNAPATSYCVECSEPLCETCVEAHQRVKYTKDHTVRSTGPAKSRDGERTVYCNVHKHEPLVLFCESCDTLTCRDCQLNAHKDHQYQFLEDAVRNQRKLLASLVKRLGDKHATLQKSTKEVRSSIRQVSDVQKRVQVDVKMAILQIMKELNKRGRVLVNDAQKVTEGQQERLERQHWTMTKIQKHQEHILRFASWALESDNNTALLLSKKLIYFQLHRALKMIVDPVEPHGEMKFQWDLNAWTKSAEAFGKIVAERPGTNSTGPAPMAPPRAPGPLSKQGSGSSQPMEVQEGYGFGSGDDPYSSAEPHVSGVKRSRSGEGEVSGLMRKVPRVSLERLDLDLTADSQPPVFKVFPGSTTEDYNLIVIERGAAAAATGQPGTAPAGTPGAPPLAGMAIVKEEETEAAIGAPPTATEGPETKPVLMALAEGPGAEGPRLASPSGSTSSGLEVVAPEGTSAPGGGPGTLDDSATICRVCQKPGDLVMCNQCEFCFHLDCHLPALQDVPGEEWSCSLCHVLPDLKEEDGSLSLDGADSTGVVAKLSPANQRKCERVLLALFCHEPCRPLHQLATDSTFSLDQPGGTLDLTLIRARLQEKLSPPYSSPQEFAQDVGRMFKQFNKLTEDKADVQSIIGLQRFFETRMNEAFGDTKFSAVLVEPPPMSLPGAGLSSQELSGGPGDGP

SEQ ID NO: 5629 - DNA, 3310 bp, Homo sapiens
atttatttattgttcctggtcactgtctctttgaggattggtatctctgctccagaaaagatggcagcctctttcttctctgattttggtcttatgtggtatctggaggagctcaaaaaggaggagttcaggaaatttaaagaacatctcaagcaaatgactttgcagcttgaactcaagcagattccctggactgaggtcaaaaaagcatcccgggaagaacttgcaaacctcttgatcaagcactatgaagaacaacaagcttggaacataaccttaagaatctttcaaaagatggatagaaaggatctctgcatgaaggtcatgagggagagaacaggatacacaaagacctatcaagctcacgcaaagcagaaattcagccgcttatggtccagcaagtctgtcactgagattcacctatactttgaggaggaagtcaagcaagaagaatgtgaccatttggaccgcctttttgctcccaaggaagctgggaaacagccacgtacagtgatcattcaaggaccacaaggaattggaaaaacgacactcctgatgaagctgatgatggcctggtcggacaacaagatctttcgggataggttcctgtacacgttctatttctgctgcagagaactgagggagttgccgccaacgagtttggctgacttgatttccagagagtggcctgaccccgctgctcctataacagagatcgtgtctcaaccggagagactcttgttcgtcatcgacagcttcgaagagctgcagggcggcttgaacgaacccgattcggatctgtgtggtgacttgatggagaaacggccggtgcaggtgcttctgagcagtttgctgaggaagaagatgctcccggaggcctccctgctcatcgctatcaaacccgtgtgcccgaaggagctccgggatcaggtgacgatctcagaaatctaccagccccggggattcaacgagagtgataggttagtgtatttctgctgtttcttcaaagacccgaaaagagccatggaagccttcaatcttgtaagagaaagtgaacagctgttttccatatgccaaatcccgctcctctgctggatcctgtgtaccagtctgaagcaagagatgcagaaaggaaaagacctggccctgacctgccagagcactacctctgtgtactcctctttcgtctttaacctgttcacacctgagggtgccgagggcccgactccgcaaacccagcaccagctgaaggccctgtgctccctggctgcagagggtatgtggacagacacatttgagttttgtgaagacgacctccggagaaatggggttgttgacgctgacatccctgcgctgctgggcaccaagatacttctgaagtacggggagcgtgagagctcctacgtgttcctccacgtgtgtatccaggagttctgtgccgccttgttctatttgctcaagagccaccttgatcatcctcacccagctgtgagatgtgtacaggaattgctagttgccaattttgaaaaagcaaggagagcacattggatttttttggggtgttttctaactggccttttaaataaaaaggaacaagaaaaactggatgcgttttttggcttccaactgtcccaagagataaagcagcaaattcaccagtgcctgaagagcttaggggagcgtggcaatcctcagggacaggtggattccttggcgatattttactgtctctttgaaatgcaggatcctgcctttgtgaagcaggcagtgaacctcctccaagaagctaactttcatattattgacaacgtggacttggtggtttctgcctactgcttaaaatactgctccagcttgaggaaactctgtttttccgttcaaaatgtctttaagaaagaggatgaacacagctctacgtcggattacagcctcatctgttggcatcacatctgctctgtgctcaccaccagcgggcacctcagagagctccaggtgcaggacagcaccctcagcgagtcgacctttgtgacctggtgtaaccagctgaggcatcccagctgtcgccttcagaagcttggaataaataacgtttccttttctggccagagtgttctgctctttgaggtgctcttttatcagccagacttgaaatacctgagcttcaccctcacgaaactctctcgtgatgacatcaggtccctctgtgatgccttgaactacccagcaggcaacgtcaaagagctagcgctggtaaattgtcacctctcacccattgattgtgaagtccttgctggccttctaaccaacaacaagaagctgacgtatctgaatgtatcctgcaaccagttagacacaggcgtgccccttttgtgtgaagccctgtgcagcccagacacggtcctggtatacctgatgttggctttctgccacctcagcgagcagtgctgcgaatacatctctgaaatgcttctgcgtaacaagagcgtgcgctatctagacctcagtgccaatgtcctgaaggacgaaggactgaaaactctctgcgaggccttgaaacatccggactgctgcctggattcactgtgtttggtaaaatgttttatcactgctgctggctgtgaagacctcgcctctgctctcatcagcaatcaaaacctgaagattctgcaaattgggtgcaatgaaatcggagatgtgggtgtgcagctgttgtgtcgggctctgacgcatacggattgccgcttagagattcttgggttggaagaatgtgggttaacgagcacctgctgtaaggatctcgcgtctgttctcacctgcagtaagaccctgcagcagctcaacctgaccttgaacaccttggaccacacaggggtggttgtactctgtgaggccctgagacacccagagtgtgccctgcaggtgctcgggctgagaaaaactgattttgatgaggaaacccaggcacttctgacggctgaggaagagagaaatcctaacctgaccatcacagacgactgtgacacaatcacaagggtagagatctgattgcgaggaacctgggctctgactcgaacacctgcaaaggacagggactgggaccgttacttacatgacactgcacccaggagatacaaatcattgatactctgagttgtgagatttctggcaccccattcatagatttgatatgatacacgtggtttttatgtgctctgtggccttggatgagtcactgaaaggccttcatggtctctcggtctcacaaggacctcttaacccctcaataaagtgttacatttctaaacattgg

SEQ ID NO: 5630 - protein, 994 aa, Homo sapiens
MAASFFSDFGLMWYLEELKKEEFRKFKEHLKQMTLQLELKQIPWTEVKKASREELANLLIKHYEEQQAWNITLRIFQKMDRKDLCMKVMRERTGYTKTYQAHAKQKFSRLWSSKSVTEIHLYFEEEVKQEECDHLDRLFAPKEAGKQPRTVIIQGPQGIGKTTLLMKLMMAWSDNKIFRDRFLYTFYFCCRELRELPPTSLADLISREWPDPAAPITEIVSQPERLLFVIDSFEELQGGLNEPDSDLCGDLMEKRPVQVLLSSLLRKKMLPEASLLIAIKPVCPKELRDQVTISEIYQPRGFNESDRLVYFCCFFKDPKRAMEAFNLVRESEQLFSICQIPLLCWILCTSLKQEMQKGKDLALTCQSTTSVYSSFVFNLFTPEGAEGPTPQTQHQLKALCSLAAEGMWTDTFEFCEDDLRRNGVVDADIPALLGTKILLKYGERESSYVFLHVCIQEFCAALFYLLKSHLDHPHPAVRCVQELLVANFEKARRAHWIFLGCFLTGLLNKKEQEKLDAFFGFQLSQEIKQQIHQCLKSLGERGNPQGQVDSLAIFYCLFEMQDPAFVKQAVNLLQEANFHIIDNVDLVVSAYCLKYCSSLRKLCFSVQNVFKKEDEHSSTSDYSLICWHHICSVLTTSGHLRELQVQDSTLSESTFVTWCNQLRHPSCRLQKLGINNVSFSGQSVLLFEVLFYQPDLKYLSFTLTKLSRDDIRSLCDALNYPAGNVKELALVNCHLSPIDCEVLAGLLTNNKKLTYLNVSCNQLDTGVPLLCEALCSPDTVLVYLMLAFCHLSEQCCEYISEMLLRNKSVRYLDLSANVLKDEGLKTLCEALKHPDCCLDSLCLVKCFITAAGCEDLASALISNQNLKILQIGCNEIGDVGVQLLCRALTHTDCRLEILGLEECGLTSTCCKDLASVLTCSKTLQQLNLTLNTLDHTGVVVLCEALRHPECALQVLGLRKTDFDEETQALLTAEEERNPNLTITDDCDTITRVEI

SEQ ID NO: 5631 - DNA, 2393 bp, Homo sapiens
gtggggcgcgggcaatggagcagagtatgggagaacgcgctcggagtaaagcacacggcgcggcgaaggcgtggcgggagtgtgcggcgccggacccgggaagctggcctgggcgccgggtctcgagtgcaggcctttgttctgaagtgtccaggccggccttgcggcgtcgggactgaggaatggagcccgtcgcggggcggggcgggaaaggaaggttcaagtctctcgggttgatgcgcaagtttccgtccccatcggccggacagattagaatcctttcaggtgctagatggcggctgcagaggctgtgcatcacatacacctgcagaacttctcacgctctctgcttgagaccctcaatgggcagaggcttgggggacacttctgtgacgtgactgtgcgcattcgtgaagcttcgctgcgtgcccaccgctgcgtgctggcggccggctcacccttcttccaagacaagctgctgctcggccactctgagatccgtgtgcctccggtggtgcccgcgcagacagtgcgacagctggtagagttcctgtacagcggttcgctcgttgtggcgcagggtgaagccctgcaggtgctcacggccgcgtcagtgcttcgcatacagacagttatcgacgaatgcacgcagattatcgcccgcgctcgagccccgggcacctctgcgcccacgcccctgcccacccctgtgcccccgccactcgcacctgcgcagctgcgtcaccgcctgcgccacctgctggctgcacgtcccccggggcaccccggtgctgcacacagccgtaagcagcgccagcccgcgcgtttgcagctgccagcgcccccaacacctgccaaggctgaggggcctgatgctgacccctcactgtccgcggcccctgatgaccgaggtgacgaggatgacgaggaaagtgacgatgagaccgatggcgaggatggcgaaggtggcggcccaggcgagggccaggcacctccttccttcccagactgtgctgctggcttcctcactgctgctgctgacagcgcgtgcgaggagccccctgcacccactggcctcgctgactacagtggtgccgggagagattttcttcggggagctgggtcagctgaggacgtatttccagacagctatgtatccacttggcacgacgaggatggcgctgtccccgaaggctgtcccactgagacccctgtccagcccgactgcatactgtctggatcccgcccgcctggtgtgaagaccccagggccgcccgttgcactcttcccctttcacttgggtgcccctgggccacccgcaccacccccttcagcaccatcggggccagcccctgcgcccccacccgccttctaccccacactccagcccgaggcagcccccagtactcagctgggggaggtcccggctccctctgctgctcccaccacggccccctcaggcacccctgctcgcaccccaggtgctgagccacctacgtatgagtgcagccactgtcgcaagacgttcagctcccggaaaaactacaccaagcacatgttcatccactcgggggagaagccgcaccagtgcgccgtgtgctggcgatccttctctctacgcgactacctgctcaaacacatggtcacgcacaccggcgtgcgcgccttccagtgcgccgtctgcgccaagcgcttcacgcagaagagctcgctcaacgtgcacatgcgcactcaccggcccgagcgcgcgccctgccccgcctgcggcaaggtcttctcgcaccgcgcgctgctggagcgccacctggcggcgcaccctgcgccctgatggcgctggggcctggcctcgcccacggtggatccggggcctcccgcacagtcggccacgcccgctgcgggacccgtggttcccgccactagaccacgctccctcctgagcgcaggtcctctctctcccttcaccctttctccataccagggcctaagtccgccttactcctctcctccatgtacttgaaccctccaggtggtgccgggctggggctggggctggttagaccacttctgagaactggactatttcctgcgtaaaccgggcgctcaggcgcttggacccggcccaagatttgactccggttctcaccccgccctctcctggggtggtggtgggggctggggggccgcttgcctgccccagggtcaggctgggcaaggtccctagctctctacccaagctgttactccctcatggggcgcctaaggagactcaagtggacccatcatatatgggggctgggcctcgggactctcgctctaataaaggactgtaggccatggggcctaaaccacgaaaaaaaaaaaaaaaaaaaaaaaaaaaaaaaaaaaaaaaaaaa

SEQ ID NO: 5632 - protein, 511 aa, Homo sapiens
MAAAEAVHHIHLQNFSRSLLETLNGQRLGGHFCDVTVRIREASLRAHRCVLAAGSPFFQDKLLLGHSEIRVPPVVPAQTVRQLVEFLYSGSLVVAQGEALQVLTAASVLRIQTVIDECTQIIARARAPGTSAPTPLPTPVPPPLAPAQLRHRLRHLLAARPPGHPGAAHSRKQRQPARLQLPAPPTPAKAEGPDADPSLSAAPDDRGDEDDEESDDETDGEDGEGGGPGEGQAPPSFPDCAAGFLTAAADSACEEPPAPTGLADYSGAGRDFLRGAGSAEDVFPDSYVSTWHDEDGAVPEGCPTETPVQPDCILSGSRPPGVKTPGPPVALFPFHLGAPGPPAPPPSAPSGPAPAPPPAFYPTLQPEAAPSTQLGEVPAPSAAPTTAPSGTPARTPGAEPPTYECSHCRKTFSSRKNYTKHMFIHSGEKPHQCAVCWRSFSLRDYLLKHMVTHTGVRAFQCAVCAKRFTQKSSLNVHMRTHRPERAPCPACGKVFSHRALLERHLAAHPAP

SEQ ID NO: 5633 - DNA, 725 bp, Homo sapiens
ggcggcgcgtggtctacgccgagtgacagagacgctcaggctgtgttctcaggatgaccgagtgggagacagcagcaccagcggtggcagagaccccagacatcaagctctttgggaagtggagcaccgatgatgtgcagatcaatgacatttccctgcaggattacattgcagtgaaggagaagtatgccaagtacctgcctcacagtgcagggcggtatgccgccaaacgcttccgcaaagctcagtgtcccattgtggagcgcctcactaactccatgatgatgcacggccgcaacaacggcaagaagctcatgactgtgcgcatcgtcaagcatgccttcgagatcatacacctgctcacaggcgagaaccctctgcaggtcctggtgaacgccatcatcaacagtggtccccgggaggactccacacgcattgggcgcgccgggactgtgagacgacaggctgtggatgtgtcccccctgcgccgtgtgaaccaggccatctggctgctgtgcacaggcgctcgtgaggctgccttccggaacattaagaccattgctgagtgcctggcagatgagctcatcaatgctgccaagggctcctcgaactcctatgccattaagaagaaggacgagctggagcgtgtggccaagtccaaccgctgattttcccagctgctgcccaataaacctgtctgccctttggggcagtcccagccaaaa

SEQ ID NO: 5634 - protein, 204 aa, Homo sapiens [sequence omitted]

SEQ ID NO: 5635 - DNA, 801 bp, Homo sapiens
cagaggttgtggtgagccgagatcacagcactgcactccagcctgggtgacaagagcaagactccgtctcaaaataaataaataaaaataaaaaataaacatgatgatcacagatgcagtcacattttctgagttcttgtctctctgccagtgccacccagatagcctcacaaaactttgacccagccactgttagtgtcgccaccgcccataaaggagctgagcccagcaggggcactgcctggggccctgtagccaaaaggctacagcaggagctgatgaccctcatgatgcctggtgacaaaagaatttctgcctaccctgaaagccttatcaaatggacaccatccatgaagcagctggcacagtgtatgaagatctgaggtataagctcttgctggagttcctcaatgactacccacctttacgatgcacccacagtgaagttcctcacaccctgctaccaccctaacgtggacacccagggtaacatatgcctggacatcctgaaggagaagtggtctgccccgtatgatatcaggaccatcctgctctctatccagtgcctgctaggacaactcaacattgatagccctttgaacacacatgctaccaagctctgggaaaaccccatagctttaagaagtacctgcaagggtcaggcgcagtggctcacacctgtaatcccagcactttgggaggccgaggtgggtggatggatcacctgacgtagagagtccaaggcctgacaaacatggagaaatgtcatccctatttaaaaaaataaaaaaattagccaag

SEQ ID NO: 5636 - DNA, 2327 bp, Homo sapiens
gactcaggtgaactaacctgcgagaagctggttgtgcgctgaggcgaccagcgccggaaggcacggtggcgactcacgctgttctcgccgctcagaggcgggtctgaggctcggtggcggcgcccagggtggcccgggccctttcctcggtcattgtctcccctccagctctactcacaggctccgatggcggcggccgccctgagggaccccgctcaggttcctgtggctgcagacttgcttacagaccatgaggagggctatgtgacctttgaggatgtggctgtctacttctcccaggaggaatggagattgcttgatgacgctcagaggctcctctaccgcaatgtgatgctggagaactttacacttctggcctctctcggacttgcatcttccaagacccatgaaataacccagctggagtcatgggaggagcccttcatgcctgcttgggaagttgtgacttcagccataccgagaggttgttggcatggagccgaggctgaggaggctcctgagcagattgcttctgtaggactgctcagttcaaacattcagcaacaccagaagcagcactgtggagagaaacccttaaaaagacaacagggcagggtcccagttttgaggagttgcaaagttcacctatcagagaagtccttgcaaagcagggaggttgggaaggccctcctgatcagctcaggtgttctcaagcaccaggtgactcacacaggagagaagtcacataggagctccaaaagtagggaggcctttcatgctggaaaaaggcattacaaatgcagtgaatgtgggaaagcctttggtcagaaatatttacttgttcagcaccagagactacatgctgggaaaaagacgtatgaatgcagtgaatgtgggaagttatttagagatatgtccaacctttttatacaccaaatagttcacactggagaaaggccttacgggtgtagtaactgtggaaaatcctttagccgtaatgctcacctcattgaacaccagagagttcacactggagaaaagccttttacatgcagtgaatgtggaaaagctttcaggcataattccacacttgttcagcatcacaaaatccacactggagtaaggccttatgagtgcagtgaatgtggaaaattgtttagtttcaactccagcctcatgaaacatcagagagttcacactggagaaagaccttataagtgcagtgaatgtggaaaattctatagccacaagtccaaccttatcaaacattggcgtgttcatactggagaaaggccttacaagtgcagcgactgtgggaaattttttacccaatgctcaagcctcatgcaacatcaaaaagttcacactggagaaaagccttttaagtgcaatgaatgtgggagattctttagagagaattccaccctagttagacatcagagggttcacactggagcaaagccttatgagtgcagggaatgtgggaaattttttagccaaagctcaaccctcatgcaacatcgaaaagttcacattggagaaaagccttttaagtgcaatgaatgtgggagattgtttagagagaattccagccttgttaaacatcagagggttcacactggagcaaagccttatgagtgcagggaatgtgggaagttttttcgccacaactccagtctttttaaacatcgaaggattcacactggagaaatgcagtgattgtgtgaaatcctttagccagcgtttcaacctcattcaacaccagaaagttcacagtggaaaaaatcttgaaggtaacagatggaaatccgttagccacacctccagtctcattcaacactggacagtttacaatgtggacaatgtagtgaatatggaaaaaggtttcagccaaaggcctaaccctattcaacaccagaaagtttagaatggagaaaggccttagggtgacaggttatgtactgtctctgaatcaatatgacctcacttaaaacagaaactctgaggatggcctttatgagggagctggcaattgaacatcattcatctaaatatgcacactggaggcaagatgagaattcctgacagattgtccttcctgagaagacagccctctgccttggagctccagagagagggagccctgtattcttggctgtacccgtcgaatggagttttgatctcgctgagtttggagttgggggaggaaaggagtggtcttggttcaaatgtgactcacttttgctgttcttgtgaatgttagatcttctttaataaatatttatttcccatacacccttatgaccattaaaaaaaaaaaaaaaaaa

SEQ ID NO: 5637 - protein, 510 aa, Homo sapiens
MAAAALRDPAQVPVAADLLTDHEEGYVTFEDVAVYFSQEEWRLLDDAQRLLYRNVMLENFTLLASLGLASSKTHEITQLESWEEPFMPAWEVVTSAIPRGCWHGAEAEEAPEQIASVGLLSSNIQQHQKQHCGEKPLKRQQGRVPVLRSCKVHLSEKSLQSREVGKALLISSGVLKHQVTHTGEKSHRSSKSREAFHAGKRHYKCSECGKAFGQKYLLVQHQRLHAGKKTYECSECGKLFRDMSNLFIHQIVHTGERPYGCSNCGKSFSRNAHLIEHQRVHTGEKPFTCSECGKAFRHNSTLVQHHKIHTGVRPYECSECGKLFSFNSSLMKHQRVHTGERPYKCSECGKFYSHKSNLIKHWRVHTGERPYKCSDCGKFFTQCSSLMQHQKVHTGEKPFKCNECGRFFRENSTLVRHQRVHTGAKPYECRECGKFFSQSSTLMQHRKVHIGEKPFKCNECGRLFRENSSLVKHQRVHTGAKPYECRECGKFFRHNSSLFKHRRIHTGEMQ

SEQ ID NO: 5638 - DNA, 2257 bp, Homo sapiens
gtgcgatcccgggcccgagggcatcagacggcggctgattagctccggtttgcatcacccggaccgggggattagctccggtttgcatcacccggaccgggggccgggcgcgcacgagactcgcagcggaagtggaggcggctccgcgcgcgtccgctgctaggacccgggcagggctggagctgggctgggatcccgagctcggcagcagcgcagcgggccggcccacctgctggtgccctggaggctctgagccccggcggcgcccgggcccacgcggaacgacggggcgagatgcgagccacccctctagctgctcctgcgggttccctgtccaggaagaagcggttggagttggatgacaacttagataccgagcgtcccgtccagaaacgagctcgaagtgggccccagcccagactgcccccctgcctgttgcccctgagcccacctactgctccagatcgtgcaactgctgtggccactgcctcccgtcttgggccctatgtcctcctggagcccgaggagggcgggcgggcctaccaggccctgcactgccctacaggcactgagtatacctgcaaggtgtaccccgtccaggaagccccggccgtgctggagccctatgcgcggctgcccccgcacaagcatgtggctcggcccactgaggtcctggctggtacccagctcctctacgcctttttcactcggacccatggggacatgcacagcctggtgcgaagccgccaccgtatccctgagcctgaggctgccgtgctcttccgccagatggccaccgccctggcgcactgtcaccagcacggtctggtcctgcgtgatctcaagctgtgtcgctttgtcttcgctgaccgtgagaggaagaagctggtgctggagaacctggaggactcctgcgtgctgactgggccagatgattccctgtgggacaagcacgcgtgcccagcctacgtgggacctgagatactcagctcacgggcctcatactcgggcaaggcagccgatgtctggagcctgggcgtggcgctcttcaccatgctggccggccactaccccttccaggactcggagcctgtcctgctcttcggcaagatccgccgcggggcctacgccttgcctgcaggcctctcggcccctgcccgctgtctggttcgctgcctccttcgtcgggagccagctgaacggctcacagccacaggcatcctcctgcacccctggctgcgacaggacccgatgcccttagccccaacccgatcccatctctgggaggctgcccaggtggtccctgatggtctggggctggacgaagccagggaagaggagggagacagagaagtggttctgtatggctaggaccaccctactacacgctcagctgccaacagtggattgagtttgggggtagctccaagccttctcctgcctctgaactgagccaaaccttcagtgccttccagaagggagaaaggcagaagcctgtgtggagtgtgctgtgtacacatctgctttgttccacacacatgcagttcctgcttgggtgcttatcaggtgccaagccctgttctcggtgctgggagtacagcagtgagcaaaggagacaatattccctgctcacagagatgacaaactggcatccttgagctgacaacacttttccatgaccataggtcactgtctacactgggtacactttgtaccagtgtcggcctccactgatgctggtgctcaggcacctctgtccaaggacaatccctttcacaaacaaaccagctgcctttgtatcttgtaccttttcagagaaagggaggtatccctgtgccaaaggctccaggcctctcccctgcaactcaggacccaagcccagctcactctgggaactgtgttcccagcatctctgtcctcttgattaagagattctccttccaggcctaagcctgggatttgggccagagataagaatccaaactatgaggctagttcttgtctaactcaagactgttctggaatgagggtccaggcctgtcaaccatggggcttctgacctgagcaccaaggttgagggacaggattaggcagggtctgtcctgtggccacctggaaagtcccaggtgggactcttctggggacacttggggtccacaatcccaggtccatactctaggttttggataccatgagtatgtatgtttacctgtgcctaataaaggagaattatgaaataaaaaaaaaaaaaaaaaaa

SEQ ID NO: 5639 - protein, 358 aa, Homo sapiens
MRATPLAAPAGSLSRKKRLELDDNLDTERPVQKRARSGPQPRLPPCLLPLSPPTAPDRATAVATASRLGPYVLLEPEEGGRAYQALHCPTGTEYTCKVYPVQEAPAVLEPYARLPPHKHVARPTEVLAGTQLLYAFFTRTHGDMHSLVRSRHRIPEPEAAVLFRQMATALAHCHQHGLVLRDLKLCRFVFADRERKKLVLENLEDSCVLTGPDDSLWDKHACPAYVGPEILSSRASYSGKAADVWSLGVALFTMLAGHYPFQDSEPVLLFGKIRRGAYALPAGLSAPARCLVRCLLRREPAERLTATGILLHPWLRQDPMPLAPTRSHLWEAAQVVPDGLGLDEAREEEGDREVVLYG

SEQ ID NO: 5640 - DNA, 2715 bp, Homo sapiens
gggagtccggggacccgcgatcagccccggaggacggggtggggtcgccccaaacaggagcgccgggaccgctgggaccccgcactcggcgtccgccgccgccgggtagccgggcagtggaggtcccggatgaggcgacaatttttccggccccccctcccagtcccgccccacttccggggccgccactttcactttctcttccgccgaagccgctccccttgcgaagaactggggcctcccgggaggagagagggctttgccttgaaacccgggacgccaggggcgctcccgcaagtgggggtcctccgggacttggaacgccccggctgggtggtgtccgggcgtcctttccccgcttcttcccacctcggctggtcccgtttcctcctgcgcccagtgcggacctgtctcggcgcccgctgccctctcaccgccccacgcaggatcccggcctggtcaccgggcagtgtgatgcttcccgactgccgcggggacagcgaggcacacacagggcttgggccgcgccggaggccacacggcctggctgagttgctcctggtctcccgcctctcccaggcgacccggaggtagcatttcccaggaggcacggtcccccccagggggatgggcacagccacgccagatggacgagaagaccaagaaagcagaggaaatggccctgagcctcacccgagcagtggcgggcggggatgaacaggtggcaatgaagtgtgccatctggctggcagagcaacgggtgcccctgagtgtgcaactgaagcctgaggtctccccaacgcaggacatcaggctgtgggtgagcgtggaggatgctcagatgcacaccgtcaccatctggctcacagtgcgccctgatatgacagtggcgtctctcaaggacatggtttttctggactatggcttcccaccagtcttgcagcagtgggtgattgggcagcggctggcacgagaccaggagaccctgcactcccatggggtgcggcagaatggggacagtgcctacctctatctgctgtcagcccgcaacacctccctcaaccctcaggagctgcagcgggagcggcagctgcggatgctggaagatctgggcttcaaggacctcacgctgcagccgcggggccctctggagccaggccccccaaagcccggggtcccccaggaacccggacgggggcagccagatgcagtgcctgagcccccaccggtgggctggcagtgccccgggtgcaccttcatcaacaagcccacgcggcctggctgtgagatgtgctgccgggcgcgccccgaggcctaccaggtccccgcctcataccagcccgacgaggaggagcgagcgcgcctggcgggcgaggaggaggcgctgcgtcagtaccagcagcggaagcagcagcagcaggaggggaactacctgcagcacgtccagctggaccagaggagcctggtgctgaacacggagcccgccgagtgccccgtgtgctactcggtgctggcgcccggcgaggccgtggtgctgcgtgagtgtctgcacaccttctgcagggagtgcctgcagggcaccatccgcaacagccaggaggcggaggtctcctgccccttcattgacaacacctactcgtgctcgggcaagctgctggagagggagatcaaggcgctcctgacccctgaggattaccagcgatttctagacctgggcatctccattgctgaaaaccgcagtgccttcagctaccattgcaagaccccagattgcaagggatggtgcttctttgaggatgatgtcaatgagttcacctgccctgtgtgtttccacgtcaactgcctgctctgcaaggccatccatgagcagatgaactgcaaggagtatcaggaggacctggccctgcgggctcagaacgatgtggctgcccggcagacgacagagatgctgaaggtgatgctgcagcagggcgaggccatgcgctgcccccagtgccagatcgtggtacagaagaaggacggctgcgactggatccgctgcaccgtctgccacaccgagatctgctgggtcaccaagggcccacgctggggccctgggggcccaggagacaccagcgggggctgccgctgcagggtaaatgggattccttgccacccaagctgtcagaactgccactgagctaaagatggtggggccacatgctgacccagccccacatccacattctgttagaatgtagctcagggagcttcgtggacggccttgcttgctgtagcgttgtaggggccctgcctgcactgcggttgtccacggtcacatctgccccagtgcctttgtccttcccttggggcttgccggccagacttctctcccctgcggctcccacctctgcctgaccccagccttaaacatagcccctggccagaggccttgctgggtggagcctctgtgtgactccatactcctcccaccacaacactcatctgtcaaacaccaagcactctcagcctccccgccttcagctgtcagctttctggggctaacttctctgcctttgtggttggaggcctgaggcctcttggaactcttgctaacctgttcagagccaggaaggagactgcacagttttgaaagcacagcccgtcaggtccggctctgcgtctccctctctgcagcctgtgtaagctattataattaaaatggttttccgggaa

SEQ ID NO: 5641 - protein, 500 aa, Homo sapiens
MALSLTRAVAGGDEQVAMKCAIWLAEQRVPLSVQLKPEVSPTQDIRLWVSVEDAQMHTVTIWLTVRPDMTVASLKDMVFLDYGFPPVLQQWVIGQRLARDQETLHSHGVRQNGDSAYLYLLSARNTSLNPQELQRERQLRMLEDLGFKDLTLQPRGPLEPGPPKPGVPQEPGRGQPDAVPEPPPVGWQCPGCTFINKPTRPGCEMCCRARPEAYQVPASYQPDEEERARLAGEEEALRQYQQRKQQQQEGNYLQHVQLDQRSLVLNTEPAECPVCYSVLAPGEAVVLRECLHTFCRECLQGTIRNSQEAEVSCPFIDNTYSCSGKLLEREIKALLTPEDYQRFLDLGISIAENRSAFSYHCKTPDCKGWCFFEDDVNEFTCPVCFHVNCLLCKAIHEQMNCKEYQEDLALRAQNDVAARQTTEMLKVMLQQGEAMRCPQCQIVVQKKDGCDWIRCTVCHTEICWVTKGPRWGPGGPGDTSGGCRCRVNGIPCHPSCQNCH

SEQ ID NO: 5642 - DNA, 2554 bp, Homo sapiens
gggagtccggggacccgcgatcagccccggaggacggggtggggtcgccccaaacaggagcgccgggaccgctgggaccccgcactcggcgtccgccgccgccgggtagccgggcagtggaggtcccggatgaggcgacaatttttccggccccccctcccagtcccgccccacttccggggccgccactttcactttctcttccgccgaagccgctccccttgcgaagaactggggcctcccgggaggagagagggctttgccttgaaacccgggacgccaggggcgctcccgcaagtgggggtcctccgggacttggaacgccccggctgggtggtgtccgggcgtcctttccccgcttcttcccacctcggctggtcccgtttcctcctgcgcccagtgcggacctgtctcggcgcccgctgccctctcaccgccccacgcaggatcccggcctggtcaccgggcagtgtgatgcttcccgactgccgcggggacagcgaggcacacacagggcttgggccgcgccggaggccacacggcctggctgagttgctcctggtctcccgcctctcccaggcgacccggaggtagcatttcccaggaggcacggtcccccccagggggatgggcacagccacgccagatggacgagaagaccaagaaagcagaggaaatggccctgagcctcacccgagcagtggcgggcggggatgaacaggtggcaatgaagtgtgccatctggctggcagagcaacgggtgcccctgagtgtgcaactgaagcctgaggtctccccaacgcaggacatcaggctgtgggtgagcgtggaggatgctcagatgcacaccgtcaccatctggctcacagtgcgccctgatatgacagtggcgtctctcaaggacatggtttttctggactatggcttcccaccagtcttgcagcagtgggtgattgggcagcggctggcacgagaccaggagaccctgcactcccatggggtgcggcagaatggggacagtgcctacctctatctgctgtcagcccgcaacacctccctcaaccctcaggagctgcagcgggagcggcagctgcggatgctggaagatctgggcttcaaggacctcacgctgcagccgcggggccctctggagccaggccccccaaagcccggggtcccccaggaacccggacgggggcagccagatgcagtgcctgagcccccaccggtgggctggcagtgccccgggtgcaccttcatcaacaagcccacgcggcctggctgtgagatgtgctgccgggcgcgccccgaggcctaccaggtccccgcctcataccagcccgacgaggaggagcgagcgcgcctggcgggcgaggaggaggcgctgcgtcagtaccagcagggagtgcctgcagggcaccatccgcaacagccaggaggcggaggtctcctgccccttcattgacaacacctactcgtgctcgggcaagctgctggagagggagatcaaggcgctcctgacccctgaggattaccagcgatttctagacctgggcatctccattgctgaaaaccgcagtgccttcagctaccattgcaagaccccagattgcaagggatggtgcttctttgaggatgatgtcaatgagttcacctgccctgtgtgtttccacgtcaactgcctgctctgcaaggccatccatgagcagatgaactgcaaggagtatcaggaggacctggccctgcgggctcagaacgatgtggctgcccggcagacgacagagatgctgaaggtgatgctgcagcagggcgaggccatgcgctgcccccagtgccagatcgtggtacagaagaaggacggctgcgactggatccgctgcaccgtctgccacaccgagatctgctgggtcaccaagggcccacgctggggccctgggggcccaggagacaccagcgggggctgccgctgcagggtaaatgggattccttgccacccaagctgtcagaactgccactgagctaaagatggtggggccacatgctgacccagccccacatccacattctgttagaatgtagctcagggagcttcgtggacggccttgcttgctgtagcgttgtaggggccctgcctgcactgcggttgtccacggtcacatctgccccagtgcctttgtccttcccttggggcttgccggccagacttctctcccctgcggctcccacctctgcctgaccccagccttaaacatagcccctggccagaggccttgctgggtggagcctctgtgtgactccatactcctcccaccacaacactcatctgtcaaacaccaagcactctcagcctccccgccttcagctgtcagctttctggggctaacttctctgcctttgtggttggaggcctgaggcctcttggaactcttgctaacctgttcagagccaggaaggagactgcacagttttgaaagcacagcccgtcaggtccggctctgcgtctccctctctgcagcctgtgtaagctattataattaaaatggttttccgggaa

SEQ ID NO: 5643 - protein, 262 aa, Homo sapiens
MALSLTRAVAGGDEQVAMKCAIWLAEQRVPLSVQLKPEVSPTQDIRLWVSVEDAQMHTVTIWLTVRPDMTVASLKDMVFLDYGFPPVLQQWVIGQRLARDQETLHSHGVRQNGDSAYLYLLSARNTSLNPQELQRERQLRMLEDLGFKDLTLQPRGPLEPGPPKPGVPQEPGRGQPDAVPEPPPVGWQCPGCTFINKPTRPGCEMCCRARPEAYQVPASYQPDEEERARLAGEEEALRQYQQGVPAGHHPQQPGGGGLLPLH

SEQ ID NO: 5644 - DNA, 2506 bp, Homo sapiens
gacgatggggctgcgtgcaggaggaacgctgggcagggccggcgcgggtcggggggcgcccgaggggcccgggccgagcggcggcgcgcagggcggcagcatccactcgggccgcatcgccgcggtgcacaacgtgccgctgagcgtgctcatccggccgctgccgtccgtgttggaccccgccaaggtgcagagcctcgtggacacgatccgggaggacccagacagcgtgccccccatcgatgtcctctggatcaaaggggcccagggaggtgactacttctactcctttgggggctgccaccgctacgcggcctaccagcaactgcagcgagagaccatccccgccaagcttgtccagtccactctctcagacctaagggtgtacctgggagcatccacaccagacttgcagtagcagcctccttggcacctgctgccaccttcaagagcccagaagacacacctggcctccagcaggctgggccatgcagaagggatagcaggggtgcattctctttgcacctggcgagagggtctgactctgggcacccctctcaccagctacaaggccttggactcactgtacagtgtgggagccccagttcccacctctgtgacaataggatcatggccttacccttgaagcattaccgagaaggagaacagagatgggcttgaagagccacgtgctgccggctccaaattcccaaggacaaggatccctctgcatttttgtctatgtaacctcttatatggactacattcagctgcaaggaaaggaaaaccttgattgcagtggtttaaacaaacagaagattgtttttccacatagcatggattctggagatgggtggctaatggtattggttcaacaactccacgaaggtaggggtcacgtcttggatccttttgccttaatctcagtgctcgttacttcatggtcccaagatggctgctgtatccccaagaatcatgtctgcgttcaaggaaggaggggtggaggaagaggaagggccaaactagctggacccgtcaccttctatcagaaagtaaaacctcgtcagaagtctgtttcctgctctctccctctgcatatcttcacttagatgcccttggcccgagccagctaccattgcacctctagctgcaaacaaagctaagacagcagggaacagaattgtcatggctgaatagaccaatcgtgttccatctactgagactggcacactgcctcctgcaataaaactgggatcccattaccaagagagaaatgcagaattgtgtaccagttagcttttgctgtgtaacaaaccatccccaaacttggcagctagaaacaaaccctgtattttcccacaatcctatgggttggcaatttgggctgggctcaacagggcagttctgctgctcacacctgggatccctcatggagctaaggtcagctgttacctcagctgggcctggatggtctaggatagccttactcacttgcctggcaggtgacaggctgttggctggaattgcttggttctcctccatgtggcctctccagcaggctagctcaggcttattcacatgatggcttcaggattccaaagagagtgagagtagaagctgaaagacttcttgagttcttggcctggaactgggactaggacagtgtcacttctgctaagttcttttggtcagagcaaatcacaaggctttacccagattcaagggatgagaaacagactacatgtcttgatgaggggaaccacaaagagcttgtggccatttttcacctatcacaaataattttggatgggtatttatttggataaaggtatttccctcttccccctttctctctgtctcatggggcctcactctgccaagttggaaggcactaagacattgtcctggccctcagggtctaggggaagaggtgttggggcaggaagtgagtctctccatgggctggacccactgtagtaggagtgcctccttgtctgcactgctggtatggggttaggccaggtaggacattccagaggggcttctgaaaaccaagagtccctggggaaagggaacagagtaaggcaggccttgttctcactgccctctaagggaacttggtcactcggcacttttaagcctcagtttctccagttcaataataaggacaagagcttttcccatgcattctctttccccgggaaagttgactgaggtgaccagtaatagaattgaaaagggagagtgtcttcagtgcaatgtggcatcctggattgggtcttggaacaaaaacaggacattagtgggaaaattggaaatctgaaaaaagtctgaattttagttaatataccaatttcagtctcttggttttgacagatgtaccatggtgatgtaagatgttgaccttggggtaggctgggtgaagggtatacaggaactctttgtactatctctgcaacttctctgtaaatctagtatcattccaaaataaaagtttatttaattt

SEQ ID NO: 5645 - protein, 145 aa, Homo sapiens
MGLKSHVLPAPNSQGQGSLCIFVYVTSYMDYIQLQGKENLDCSGLNKQKIVFPHSMDSGDGWLMVLVQQLHEGRGHVLDPFALISVLVTSWSQDGCCIPKNHVCVQGRRGGGRGRAKLAGPVTFYQKVKPRQKSVSCSLPLHIFT

SEQ ID NO: 5646 - DNA, 1617 bp, Homo sapiens
gtctgagcgcgctcggcttttttttttttttctctctccttccctgcagcagtggccggtgtccagctgcctactttctgcccggatctctggctcctcatctctccggtctccgcagactaaagccctcgggatatgcagcagccatgcctgtgcacacgctgagccccggagccccgtccgcccccgccctaccttgccgcctgcggaccagggtccctggctacctgctacgggggccggcagatggtggagcccggaaaccgagcgctgtggagcgcctggaggccgacaaggccaagtacgtcaagagcctgcacgtggccaacacccgccaggagcctgtgcagcccctgctgtccaaacagccgctctttagccctgagactcgccgcacagtgctcacgcccagccgccgagccctgcctggcccctgccgacggccccagctggacctggacatcctcagcagcctcatcgacttgtgtgacagccccgtgtcccctgccgaggccagccgcactcctggacgggccgagggagccggccgtcctcccccagccacccctccgcgaccgccgcccagtacctctgcggtccgccgggtggacgtccgccccctgcccgcctcgcctgcccggccctgcccatcacccggccctgccgccgcctccagcccagcccggccgccgggtttgcaacgctccaagtcggacttgagcgagcgcttttctagggcagccgctgatctcgagcgcttttttaacttctgcggcctggacccggaggaggcgagagggttgggtgtggcccacctggcacgggccagctcggatatcgtgtccctggcagggcccagtgctgggccgggcagctctgaagggggctgctcccgccgcagctcggtgactgttgaggagcgggcccgggagcgcgttccctatggcgtgtcggtggtggagcgcaatgcccgcgtgatcaagtggttgtatgggctaaggcaggctcgggagagcccagcagctgaaggctaggcgccactgggcctggaattcgccacaggacggatcttacagaggcaagtggtccctggacctctcttgcatccattctctagacggccgtgtcagaggctccaccctgttgtgaacttggtatggaggcaaaggcttagaggctggaccagcattgttgggcaaggactgactctccaagggttttgttcttggctttggacacctgagaaccccctcctcccctcccccaatacaaggtttttgacatgagtgtactcctgcttagttcctcttgtggggctgcatttgcggtgctttgccctccccactgtgagtgaggggccaagggatctcctcaatcctgtctccccagcggctctgtttcctccttccttccttggcctctgtcctttgctgacttcctcttccttacccagcagaactcaccctggggtcggggcagtggggaggggcctatccactgctcttcctagtccttggcagctggcctaggtgggcagactataggagggactggttaggagtctgcattgctttgacttccctctccttggttaataaacacaaatgcttgtttctc

SEQ ID NO: 5647 - DNA, 3164 bp, Homo sapiens
gcaagaaccagcgcaagagggaagcagagttatagctaccccggccgcggagccggctcactgcactacccccgcccccttctttcctccagacgccgaagtcgcgggcgctcatggcgggcctggaggtactgttcgcatcggcagcgccggccatcacctgcaggcaggacgcgctcgtctgcttcttgcattgggaagtggtgacacacggttacttcggcttgggtgtcggtgaccagccgggtcccaatgataagaagtcagaactgctgccagctgggtggaacaacaataaagacctgtatgtcctccggtatgagtataaggatgggtccagaaagctccttgtgaaagccatcaccgtggagagcagcatgatcctcaatgtgctggaatatggctcacagcaagtggcagacttgaccctgaacttggatgattatatcgatgcagaacacctgggtgacttccacaggacctacaagaacagtgaggagcttcggtctcgtattgtgtctggaatcatcacacctatccatgagcagtgggaaaaggctaatgtaagcagtccccaccgggagttcccccctgctaccgccagagaggtggacccactccggattcctccacaccacccacacaccagtcggcagcctccctggtgtgatcccctgggcccgtttgttgtcgggggagaagacttagacccttttgggcctcggagaggtggcatgattgtggatcccctgagatctggcttcccaagagcacttattgacccttcctcaggcctcccgaaccgacttcctccaggcgctgtgcccccaggagctcgctttgacccctttggacccattgggaccagcccacccggacctaacccagaccatctccccccgccgggctacgatgacatgtacctgtgaaggcctcaagaatgtaacatcccaggcttccctccattctcctggagctgccaccgctgtccccatcagcaaccatgttcttgcaggctgggggcaagggattctgctcatgtgtttgcagaccggctgggatagcctccccaccccttatcagagccaagacacctgctgcagctctccacctagctgcagatagctcccaaagagaaatcagtgtgtctctttcaccatcagctcctcccctttcaccaccagctcctctccacttcccaagggagactccggcaaccttcagcaacatatatcctcgaccagatgcagtgctataagaacagaacgcattttggatgttattattaagaaccaaatgtcaatacagaattcatgttgccggtttcccacttttctttttacattaatgcatagctgcttccatttatgagactttagagtttgagtttctgtagggctgaatgactctttttcctgcccagggcccattcttgcttctcaggcaccttccgtttattaattgccattgctcctgacatcactaagatgggtccccttctggctgcatgaatggaaatgagtgactggaaatcccataggccacaagaatgactttcacaagggcaggaacattgtggaaagactgcatcattctgatgaggcaaaatcctccagctattcctgtctgggccagttttgtaggtccatctgtgcatgggcagcagtagtcaaaaagccaaggaaaaaacagagcagacctgaaggctaatcttatttttgccactaacttagtgaatgaccctaagcaagttccttctcctcttagggccttgtgccaagcctatgaaattggaggtggctttcctgctctaaagcattttgatgtctcattctgtgtttggtaacccctataaactggggcagaggaaaagaatgatggttcaaggccatacttcccttgaaccttgtgtggttcttgcctaactctgtggtttttggaccccatggggcccagacagagcacaggagcatgggctgcctctgagtgtggtgttgaacttcgggaggagcagggagccctgcaccttgtgtcctggcccacctgacctttggtgttctccggatccttttcagcccgaggcctgacagacgcgggcagtgatgagccctgttctggagtggaaagagcacgatagagcaccaggctaagaggcacgagatcaaggcggtagtcacttccgctctgcagctagcatttcaaccatatgtggatcctttcatttctcagctccctggattccttcccctaaattaggacctattatttacctgtaggtaagcaagctactgtagctcttctgaggtatctgccaggctgttttctgtagcctcagattgcctatctgcttagcctgagaacaggtagatgaaaactaaactgatgcctaggcccagggtcagtctcagatggaagctgggcctgggtggggaggctagcatgcgtggctccctgggtatttctgtcagtccccatggcaagcagtgatttagtaaaacaccccagagtcagggaagccaaccaccttgaaacctttagaacatctctgctttggagaaagacccagagatcaggcagaggtgcagattcaatcattactcataacctttgagagatggcaaatgggaggagtgttagtctttgttttggaattggaccattcttgcaaccaaaaggacttagagcagtttgctcataaagacatcctttattataaaaggaagtatttaaaggatgatagagaccatcagatagaagcagggaaggtagataacttttaggaccttgatgtgaggaaaagataaaatttaaacaataaatttgccacttagattttctagcagcaaagtccgaaaagatagttatatacaaaattctgttttctgaaaacaaaattgtgattcaccttcagaattggccattttttttgtgagtttccttgcatcaaggacactgagaaacacagtcattgtcttaggtgttctatgggaggaagtgaatagagcctttaggaacttcctggtcaagcttatggtgcttattttgatctgggccacttccctccttccagtcatgagtaatcatcaaggagcaagttggagtgtttcaggtgtatattttgtagaacccaaaagattggagccttaacaataaacatcagcact

SEQ ID NO: 5648 - DNA, 1578 bp, Homo sapiens
gcgacgcgccgaggtactaggcagagccgtggaaccgccgccaggtcgctgttggtccacgccgcccgtcgcgccgcccgcccgctcagcgtccgccgccgccatgggagtgcaggtggaaaccatctccccaggagacgggcgcaccttccccaagcgcggccagacctgcgtggtgcactacaccgggatgcttgaagatggaaagaaatttgattcctcccgggacagaaacaagccctttaagtttatgctaggcaagcaggaggtgatccgaggctgggaagaaggggttgcccagatgagtgtgggtcagagagccaaactgactatatctccagattatgcctatggtgccactgggcacccaggcatcatcccaccacatgccactctcgtcttcgatgtggagcttctaaaactggaatgacaggaatggcctcctcccttagctccctgttcttggatctgccatggagggatctggtgcctccagacatgtgcacatgagtccatatggagcttttcctgatgttccactccactttgtatagacatctgccctgactgaatgtgttctgtcactcagctttgcttccgacacctctgtttcctcttcccctttctcctcgtatgtgtgtttacctaaactatatgccataaacctcaagttattcattttattttgttttcattttggggtgaagattcagtttcagtcttttggatataggtttccaattaagtacatggtcaagtattaacagcacaagtggtaggttaacattagaataggaattggtgttggggggggggtttgcaagaatattttattttaattttttggatgaaatttttatctattatatattaaacattcttgctgctgcgctgcaaagccatagcagatttgaggcgctgttgaggactgaattactctccaagttgagagatgtctttgggttaaattaaaagccctacctaaaactgaggtggggatggggagagcctttgcctccaccattcccacccaccctccccttaaaccctctgcctttgaaagtagatcatgttcactgcaatgctggacactacaggtatctgtccctgggccagcagggacctctgaagccttctttgtggccttttttttttttcatcctgtggtttttctaatggactttcaggaattttgtaatctcataactttccaagctccaccacttcctaaatcttaagaactttaattgacagtttcaattgaaggtgctgtttgtagacttaacacccagtgaaagcccagccatcatgacaaatccttgaatgttctcttaagaaaatgatgctggtcatcgcagcttcagcatctcctgttttttgatgcttggctccctctgctgatctcagtttcctggcttttcctccctcagccccttctcacccctttgctgtcctgtgtagtgatttggtgagaaatcgttgctgcacccttcccccagcaccatttatgagtctcaagttttattattgcaataaaagtgctttatgccggcttttctcaaaaaaaaaaaaaaaaaa

SEQ ID NO: 5649 - protein, 108 aa, Homo sapiens
MGVQVETISPGDGRTFPKRGQTCVVHYTGMLEDGKKFDSSRDRNKPFKFMLGKQEVIRGWEEGVAQMSVGQRAKLTISPDYAYGATGHPGIIPPHATLVFDVELLKLE

SEQ ID NO: 5650 - DNA, 810 bp, Homo sapiens
gcgacgcgccgaggtactaggcagagccgtggaaccgccgccaggtcgctgttggtccacgccgcccgtcgcgccgcccgcccgctcagcgtccgccgccgccatgggagtgcaggtggaaaccatctccccaggagacgggcgcaccttccccaagcgcggccagacctgcgtggtgcactacaccgggatgcttgaagatggaaagaaatttgattcctcccgggacagaaacaagccctttaagtttatgctaggcaagcaggaggtgatccgaggctgggaagaaggggttgcccagatgagtgtgggtcagagagccaaactgactatatctccagattatgcctatggtgccactgggcacccaggcatcatcccaccacatgccactctcgtcttcgatgtggagcttctaaaactggaatgacaggaatggcctcctcccttagctccctgttcttgggtaaggaaatggaatactgaagggcccttcactgcctttgctcctcccatgttatgcccagcgtttgatgggtagcagagagaacaaaaaacaccacaaggctatttttccccctgcattctttctgtattgagtatcctttcagtgttattagtgtatgctttgaatgtaaaaattggtcaccctaaggaaaggaattggcatgtgtatgttcccagttcaactcatggagatggcagctgtttaaatgtttttctatgtagtttataaattaaaactgaattgaggactatggaaatgtaggccaaatttgtagtgccaacattttagttctttggaaataa

SEQ ID NO: 5651 - protein, 108 aa, Homo sapiens; identical to SEQ ID NO: 5649

SEQ ID NO: 5652 - DNA, 1450 bp, Homo sapiens
ggcacgaggggcaagcggaacgcggcagcggggctgggcctgtgcggcggccgccggagcgctttggaaggcgcacggggcgaagatggcggcggagcgacaggaggcgctgagggagttcgtggcggtgacgggcgccgaggaggaccgggcccgcttctttctcgagtcggccggctgggacttgcagatcgcgctagcgagcttttatgaggacggaggggatgaagacattgtgaccatttcgcaggcaacccccagttcagtgtccagaggcacagcccccagtgataatagagtgacatccttcagagacctcattcatgaccaagatgaagatgaggaggaagaggaaggccagaggttttatgctgggggctcagagagaagtggacagcagattgttggccctcccaggaagaaaagtcccaacgagctggtggatgatctctttaaaggtgccaaagagcatggagctgtagctgtggagcgagtgaccaagagccctggagagaccagtaaaccgagaccatttgcaggaggtggctaccgccttggggcagcaccagaggaagagtctgcctatgtggcaggagaaaagaggcagcattccagccaagatgttcatgtagtattgaaactctggaagagtggattcagcctggataatggagaactcagaagctaccaagacccatccaatgcccagtttctggagtctatccgcagaggggaggtgccagcagagcttcggaggctagctcacggtggacaggtgaacttggatatggaggaccatcgggacgaggactttgtgaagcccaaaggagccttcaaagccttcactggcgagggtcagaaactgggcagcactgccccccaggtgttgagtaccagctctccagcccaacaggcagaaaatgaagccaaagccagctcttccatcttaatcgacgaatcagagcctaccacaaacatccaaattcggcttgcagacggcgggaggctggtgcagaaatttaaccacagccacaggatcagcgacatccgactcttcatcgtggatgcccggccagccatggctgccaccagctttatcctcatgactactttcccgaacaaagagctggctgatgagagccagaccctgaaggaagccaacctgctcaatgctgtcatcgtgcagcggttaacataaccgcccagccagctgcctggcctccctcctgtgtttcccatggccagtggccatgccccatggggatcgcccctcctgcccccttgtgcacacccagcagtccagtgcaacgtctcctccatagctctgggttcttagatcttggttggacgtttgttttctccttagttgcatttcctgggtttttgtgatgatcaatggactttaatgaaaaaaaaaaataaaaacaaccaaaaaaaaaaaaaaaaaaaa

SEQ ID NO: 5653 - protein, 370 aa, Homo sapiens
MAAERQEALREFVAVTGAEEDRARFFLESAGWDLQIALASFYEDGGDEDIVTISQATPSSVSRGTAPSDNRVTSFRDLIHDQDEDEEEEEGQRFYAGGSERSGQQIVGPPRKKSPNELVDDLFKGAKEHGAVAVERVTKSPGETSKPRPFAGGGYRLGAAPEEESAYVAGEKRQHSSQDVHVVLKLWKSGFSLDNGELRSYQDPSNAQFLESIRRGEVPAELRRLAHGGQVNLDMEDHRDEDFVKPKGAFKAFTGEGQKLGSTAPQVLSTSSPAQQAENEAKASSSILIDESEPTTNIQIRLADGGRLVQKFNHSHRISDIRLFIVDARPAMAATSFILMTTFPNKELADESQTLKEANLLNAVIVQRLT

SEQ ID NO: 5654 - DNA, 696 bp, Homo sapiens
atgacggtgggcaagagcagcaagatgctgcagcatattgattacaggatgaggtgcatcctgcaggacggccggatcttcattggcaccttcaaggcttttgacaagcacatgaatttgatcctctgtgactgtgatgagttcagaaagatcaagccaaagaactccaaacaagcagaaagggaagagaagcgagtcctcggtctggtgctgctgcgaggggagaatctggtctcaatgacagtagagggacctcctcccaaagatactggtattgctcgagttccacttgctggagctgccgggggcccagggatcggcagggctgctggcagaggaatcccagctggggttcccatgccccaggctcctgcaggacttgctgggccagtccgtggggttggcgggccatcccaacaggtgatgaccccacaaggaagaggtactgttgcagccgctgcagctgctgccacagccagtattgccggggctccaacccagtacccacctggccgtgggggtcctcccccacctatgggccgaggagcaccccctccaggcatgatgggcccacctcctggtatgagacctcctatgggtcccccaatggggatcccccctggaagagggactccaatgggcatgccccctccgggaatgcggcctcctccccctgggatgcgaggccttctttga

SEQ ID NO: 5655 - protein, 231 aa, Homo sapiens
MTVGKSSKMLQHIDYRMRCILQDGRIFIGTFKAFDKHMNLILCDCDEFRKIKPKNSKQAEREEKRVLGLVLLRGENLVSMTVEGPPPKDTGIARVPLAGAAGGPGIGRAAGRGIPAGVPMPQAPAGLAGPVRGVGGPSQQVMTPQGRGTVAAAAAAATASIAGAPTQYPPGRGGPPPPMGRGAPPPGMMGPPPGMRPPMGPPMGIPPGRGTPMGMPPPGMRPPPPGMRGLL

SEQ ID NO: 5656 - DNA, 2823 bp, Homo sapiens
ggcacgaggcttctggccttctcctgtcagcagttcctcagtcaacatgtacttcagatcttcctgggcttatgtgcagaaaatcacttccatccagggaattctagcccagggcattggaaacagcaggggcagcagtattcccatgtaagctgttggtttgaaaatgcagaaggtcaggagagaggaggtggctccaaaccctggtctgcaaggacagaggagagagaaacctcaagggcattccccagcccactccaaagacagtcagcaagtcctagaaaaggcaacatggtggtagaaacagagcccagctcagcccaaagaccaaaccctgtgcagctagacaaaggcttgaaggaattagaaaccttgagatttggagcaatcaactgtagagagtatgaaccggaccataacctggaatcaaactttattacaaacccgaggaccctcttagggaagaagccctacatttgcagtgattgtgggcgaagctttaaagatagatcaaccctcatcagacaccatcgtatacactcgatggagaagccttatgtgtgcagtgagtgcgggcgaggttttagccagaagtccaacctcagcagacaccagagaacacattcagaagagaagccttatttgtgcagggagtgtgggcaaagctttagaagtaagtccatcctcaatagacatcagtggactcactcagaggagaagccctatgtttgcagcgagtgtgggcgaggctttagcgagaagtcatccttcatcagacaccagaggacacactccggtgagaaaccctatgtgtgcctggagtgtggacgaagcttttgtgataagtcaaccctcagaaaacaccagaggatacactcaggggagaagccttatgtttgcagggagtgtgggcgaggctttagccagaactcagatctcatcaaacaccagaggacacacttggatgagaagccttatgtttgcagggagtgtgggcgaggcttttgtgacaagtcaaccctcatcatacacgagcggacgcactctggagagaagccttatgtgtgtggtgagtgtggccgaggctttagtcggaaatcactcctccttgtccaccagaggacacactcaggggagaagcattatgtctgcagggagtgtaggcgaggttttagccagaagtcaaatctcatcagacaccagaggacgcactcaaatgagaagccttatatttgcagggaatgtgggcgaggcttttgtgacaagtcaaccctcattgtacatgagaggacacactcaggagagaagccttacgtgtgcagtgagtgtggccgaggctttagccggaaatcactcctccttgtccaccagaggacacactcaggggagaagcattatgtttgtagggagtgtgggcgaggctttagtcataagtcaaatctcatcagacaccagaggacacactgacgggagaaacctgtgtatgcaggggtcatgaacaagacctgagtgaccagtcaagcctcatgttaccccagagagacacatggggagtagaccctgtgtacacagattgtgagtgaagttccagagatgtgtcagcccttatcaggcatgggagggacacgttcaggagaggagccttatgagtatagagtacgggcaactgtagccatcagtcggccttgagcatgcacaaaaggacacacttaggagagaagtttatgtgtagggactgtgggaaggctttagcaataatcaacatttaccagacatccaatgacagcctcaggggaaagcacccttgtctggggagtgttggggagcatcagtaaaagaatggacactcaggcacagagtggccctcaggaaggaggtctttgtttgtaggatgtatgggcaaagcttttgtgatcacacaccacagggagaatctgcatgtggggacactgtggagctctgcccagatgaccttttcaggggtaacaccccagctgcttgagagaacagtgttgctgctggcagagatgcattccagagatgcactccgctctggaactcactctcagccacagggagctgcatgcaccacaggggcaatgcacctttgcaggggtaccttctggccccaacccttgactcaacggggacaactccagaaggtcattccagatccagagatccccatcgaactgaaggatcactgggttgcagacacattgcaggtcagcttcttcctctgcccagtcctgccctcactccccagtgaatcctcaattttctgtctcgttgtctgtccagataattgattctaagacatgttaggtatataaggagtgtagataaggcttcagccatgagtcaccccccagtaagccccagagtatattgaatagaaattctgcatgtgtggggagaatggacaaggacttaggaaaaagtcctcatcaaagaacagcttttttgggacaagctttacatgggtggggagggaaaatgtgaaacacattagcaataagttaaacctcatcttgtactaaaggaggacacactcagggagaagacctctgtgggcagggcttgtgggtggagcttcatcccgatgtcactcctcaactgacttaggaggacagtcttgctaccccaagtcactacctcactcacctctgagggattttcaggaaatgtcttgactcccccatgtactctgtatgtgagcgaagatggcagtaactgttaaataagcattcttttctacttcttggaatcagatgaaataaaaaagcaggctttatttaagtaatcaaaaaaaaaaaaaaaaaa

SEQ ID NO: 5657 - protein, 391 aa, Homo sapiens
MVVETEPSSAQRPNPVQLDKGLKELETLRFGAINCREYEPDHNLESNFITNPRTLLGKKPYICSDCGRSFKDRSTLIRHHRIHSMEKPYVCSECGRGFSQKSNLSRHQRTHSEEKPYLCRECGQSFRSKSILNRHQWTHSEEKPYVCSECGRGFSEKSSFIRHQRTHSGEKPYVCLECGRSFCDKSTLRKHQRIHSGEKPYVCRECGRGFSQNSDLIKHQRTHLDEKPYVCRECGRGFCDKSTLIIHERTHSGEKPYVCGECGRGFSRKSLLLVHQRTHSGEKHYVCRECRRGFSQKSNLIRHQRTHSNEKPYICRECGRGFCDKSTLIVHERTHSGEKPYVCSECGRGFSRKSLLLVHQRTHSGEKHYVCRECGRGFSHKSNLIRHQRTH

SEQ ID NO: 5658 - DNA, 2044 bp, Homo sapiens
gatgagggtctgcggggccgccaaaggagcccacggatctcacccacctgcggctgcagcagactgatctcctccacttccttcagcgccagcagcgcgtagccgaccgcgtgctcaaacagcacgtgcaacagcacctggaacgggagccggggcgcgagcgtcaacgcaacctcagcgtctgccggaacccgttcccagggcaggcgcaggcgcaggcgcaggcccaggcccaggcccaggccctgtctgcggcccgaacgcaggccgaaacccccaccgtcgcgtcgcccgcgccccgcaaccactcctcaccatggcgccagctcccgggttcggctcgcaatgcggctagcgcgctccggcgcgcggaaccaggctccagaggccacgcccccgcccccccgaccaatcggaggccggggacgacaccatctccggcctttggaggggccgcccagggtggtatcgcccggagcgcgggctgggtggtgccgagcgcgggcgagcgggccttttccggcctctgcagctgcgcgggcgggcgtggttgccggggacgcgcggcccccggtcgggcactgcaggcggcgaaacgacttgggaaggccctttcggggtaatagtccggttcctgatgttcttgtcatatgagttacgggcagcagagctgggtgaagtcggggcgggaggtccgcgtggggcgcggcgtccatcccagacagagaccgctgcctagccggcttcccgcttcgtccgtggcctcgggccccagaccctgcgccccacgtccccgggacccaggcgttcccgtcccctactcggggacgagcctccccggcgccgggtgggcggtgcatcctttcctcccacccgtaacgggagcggtgcctggcgcgctctggcgcagaccctgctgggaatgtagctcgcgcagttttcttcgtactattaatttatttcttttttttgtttttggttttttttttttaaatgactgtagcaggcagtaacgtgcgaaagaaagacgctccagcgtcttcctaggccagtttcttgttgctgtgctgcacgggacccagctccttttgctgggccacgtgttgctcctccgcttgggcggccctgaattctgggcgctggtgatcgctgagtgaatcgcagctgcttccctgtccttgagggcgtcttttgggcactcaggcgactctttagaaatgagttttgctttaataattaatattaacgttataaatccaaaacctagttatacttaagtagcgtatcccctggtatgttttaaagagtcattcgaaggggatttttaaaaataatgtatagctataaactgcatttatacatttaattgttattttgttaagcgattgagttacttgacaaaatccaagtacatagttcactcacaaatctaatatgtcaaacctaaatgtggttggtaaatcttactctcataatttcaatatggtttacagatgtggttgaattctgttacacatgtctacttacgagtcagaatcgttattccatttaatattttaaaatggaattgccaagttaatccatacattagcatgttaaattattttaaccgtcgtgaatacatcaaaatagacgattccaaaatgtaatggaaaatactaatgctaatacttcaatttacttcattatttctgcccttaatcctgaatcttcctggagttacaggtgcttatccactaaaccaggggttttcaagcaagaagtcagaatgcattaatggacagcatttaaaaaaataggattgggtgggctataatccagcactttaggaggccgaggcaggcggatcacttaagatcaggagttcgagaccagcctggccaacatggtgaaaccccgtctctaccaaaaaataaaaaaattagctggacgtggtggagcatgtctgtaatcccagctactcgggaggctgaggaaggagaatcgcttgaacccgggaggcagaggctgcactctagcctgggcaacagagcaaggctctgtc

SEQ ID NO: 5659 - protein, 120 aa, Homo sapiens
MSYGQQSWVKSGREVRVGRGVHPRQRPLPSRLPASSVASGPRPCAPRPRDPGVPVPYSGTSLPGAGWAVHPFLPPVTGAVPGALWRRPCWECSSRSFLRTINLFLFFVFGFFFLNDCSRQ

SEQ ID NO: 5660 - DNA, 1903 bp, Homo sapiens
cgaacccgggagctggcgccatggtgctgttgcacgtgctgtttgagcacgcggtcggctacgcgctgctggcgctgaaggaagtggaggagatcagtctgctgcagccgcaggtggaggagtctgtgctcaacctgggcaaattccacagcatcgttcgtctggtggccttttgtccctttgcctcatcccaggttgccttggaaaatgccaacgccgtgtctgaaggggttgttcatgaggacctccgcctgctcttggagacccacctgccgtccaaaaagaagaaagtactcttgggagttggggatcccaagattggtgccgcaatacaggaggagttagggtacaactgccagactggaggagtcatagctgagatcctgcgaggagttcgtctgcacttccacaatctggtgaagggtctgaccgatctgtcagcttgtaaagcacagctggggctgggacacagctattcccgtgccaaagttaagtttaatgtgaaccgggtggacaatatgatcatccagtccattagcctcctggaccagctggataaggacatcaataccttctctatgcgtgtcagggagtggtacgggtatcactttccggagctggtgaagatcatcaacgacaatgccacatactgccgtcttgcccagtttattggaaaccgaagggaactgaatgaggacaagctggagaagctggaggagctgacaatggatggggccaaggctaaggctattctggatgcctcacggtcctccatgggcatggacatatctgccattgacttgataaacatcgagagcttctccagtcgtgtggtgtctttatctgaataccgccagagcctacacacttacctgcgctccaagatgagccaagtagcccccagcctgtcagccctaattggggaagcggtaggtgcacgtctcatcgcacatgctggcagcctcaccaacctggccaagtatccagcatccacagtgcagatccttggggctgaaaaggccctgttcagagccctgaagacaaggggtaacactccaaaatatggactcattttccactccaccttcattggccgagcagctgccaagaacaaaggccgcatctcccgatacctggcaaacaaatgcagtattgcctcacgaatcgattgcttctctgaggtgcccacgagtgtattcggggagaagcttcgagaacaagttgaagagcgactgtccttctatgagactggagagataccacgaaagaatctggatgtcatgaaggaagcaatggttcaggcagaggaagcggctgctgagattactaggaagctggagaaacaggagaagaaacgcttaaagaaggaaaagaaacggctggctgcacttgccctcgcgtcttcagaaaacagcagtagtactccagaggagtgtgaggagatgagtgaaaaacccaaaaagaagaaaaagcaaaagccccaggaggttcctcaggagaatggaatggaagacccatctatctctttctccaaacccaagaaaaagaaatctttttccaaggaggagttgatgagtagcgatcttgaagagaccgctggcagcaccagtattcccaagaggaagaagtctacacccaaggaggaaacagttaatgaccctgaggaggcaggccacagaagtggctccaagaaaaagaggaaattctccaaagaggagccggtcagcagtgggcctgaagaggcggttggcaagagcagctccaagaagaagaaaaagttccataaagcatcccaggaagattagaatgcaaatggacattctctgggaggtggggcataccatagcccaaggtgacatttcccaccctgtgccgtgttccccaataaaaacaaattcacaag

SEQ ID NO: 5661 - DNA, 1597 bp, Homo sapiens
tgatacatcgttgctcattttgcagaacataacagttgcacattgcaagagtcaacttgcttcgggtcttttcatgctcatggcggtattgagcggagtccgctggctgacccgagcgctggtctccgccgggaaccctggggcatggagaggtctgagtacctcggccgcggcgcacgctgcatcgcggagccaggccgaggacgtgagggtggagggctcctttcccgtgaccatgcttccgggagacggtgtggggcctgagctgatgcacgccgtcaaggaggtgttcaaggctgccgctgtcccagtggagttccaggagcaccacctgagtgaggtgcagaatatggcatctgaggagaagctggagcaggtgctgagttccatgaaggagaacaaagtggccatcattggaaagattcataccccgatggagtataagggggagctagcctcctatgatatgcggctgaggcgtaagttggacttatttgccaacgtagtccatgtgaagtcacttcctgggtatatgactcggcacaacaatctagacctggtgatcattcgagagcagacagaaggggagtacagctctctggaacatgagagtgcaaggggtgtgattgagtgtttgaagattgtcacacgagccaagtctcagcggattgcaaagttcgcctttgactatgccaccaagaaggggcggggcaaggtcactgctgtccacaaggccaacatcatgaaacttggggatgggttgttcctgcagtgctgtgaggaagttgctgaactgtaccccaaaatcaaatttgagacaatgatcatagacaactgctgcatgcagctggtgcagaatccttaccagtttgatgtgcttgtgatgcccaatctctatgggaacattattgacaatctggctgctggcctggttgggggagctggtgtggtccctggtgagagctatagtgcagaatacgcagtctttgagacgggtgcccggcacccatttgcccaggcagtgggcaggaatatagccaatcccacggccatgctgctgtcggcttccaacatgctgcggcatcttaatcttgagtatcactccagcatgatcgcagatgcggtgaagaaggtgatcaaagttggcaaggtgcggactcgagacatgggcggctacagcaccacaaccgacttcatcaagtctgtcatcggtcacctgcagactaaagggagctagagccctttatttcttccaaccttgcaaggaccacactccccatacccttcagtgcagtgtaccagggaagagaccttgtgcctctaagcagtggaccatggtcaccccttgctgggtagagcctaggttgtccttgggccggcttccttaggggacagactgttgggtggtgatggggattgttaggatggagcccaggccacatggatgatgatgattctcccccacaggttcgaacctctgacatgggtggctatgctacttgccatgacttcactgaggctgtcattgctgccttgccccacccataggccctgtccatacccatgtaaggtgttcaataaagaacatgaaccaaaa

SEQ ID NO: 5662 - protein, 385 aa, Homo sapiens
MAVLSGVRWLTRALVSAGNPGAWRGLSTSAAAHAASRSQAEDVRVEGSFPVTMLPGDGVGPELMHAVKEVFKAAAVPVEFQEHHLSEVQNMASEEKLEQVLSSMKENKVAIIGKIHTPMEYKGELASYDMRLRRKLDLFANVVHVKSLPGYMTRHNNLDLVIIREQTEGEYSSLEHESARGVIECLKIVTRAKSQRIAKFAFDYATKKGRGKVTAVHKANIMKLGDGLFLQCCEEVAELYPKIKFETMIIDNCCMQLVQNPYQFDVLVMPNLYGNIIDNLAAGLVGGAGVVPGESYSAEYAVFETGARHPFAQAVGRNIANPTAMLLSASNMLRHLNLEYHSSMIADAVKKVIKVGKVRTRDMGGYSTTTDFIKSVIGHLQTKGS

SEQ ID NO: 5663 - DNA, 2205 bp, Homo sapiens
atgtgggggctcctgctcgccctggccgccttcgcgccggccgtcggcccggctctgggggcgcccaggaactcggtgctgggcctcgcgcagcccgggaccaccaaggtcccaggctcgaccccggccctgcatagcagcccggcacagccgccggcggagacagctaacgggacctcagaacagcatgtccggattcgagtcatcaagaagaaaaaggtcattatgaagaagcggaagaagctaactctaactcgccccaccccactggtgactgccgggccccttgtgacccccactccagcagggaccctcgaccccgctgagaaacaagaaacaggctgtcctcctttgggtctggagtccctgcgagtttcagatagccggcttgaggcatccagcagccagtcctttggtcttggaccacaccgaggacggctcaacattcagtcaggcctggaggacggcgatctatatgatggagcctggtgtgctgaggagcaggacgccgatccatggtttcaggtggacgctgggcaccccacccgcttctcgggtgttatcacacagggcaggaactctgtctggaggtatgactgggtcacatcatacaaggtccagttcagcaatgacagtcggacctggtggggaagtaggaaccacagcagtgggatggacgcagtatttcctgccaattcagacccagaaactccagtgctgaacctcctgccggagccccaggtggcccgcttcattcgcctgctgccccagacctggctccagggaggcgcgccttgcctccgggcagagatcctggcctgcccagtctcagaccccaatgacctattccttgaggcccctgcgtcgggatcctctgaccctctagactttcagcatcacaattacaaggccatgaggaagctgatgaagcaggtacaagagcaatgccccaacatcacccgcatctacagcattgggaagagctaccagggcctgaagctgtatgtgatggaaatgtcggacaagcctggggagcatgagctgggggagcctgaggtgcgctacgtggctggcatgcatgggaacgaggccctggggcgggagttgcttctgctcctgatgcagttcctgtgccatgagttcctgcgagggaacccacgggtgacccggctgctctctgagatgcgcattcacctgctgccctccatgaaccctgatggctatgagatcgcctaccaccggggttcagagctggtgggctgggccgagggccgctggaacaaccagagcatcgatcttaaccataattttgctgacctcaacacaccactgtgggaagcacaggacgatgggaaggtgccccacatcgtccccaaccatcacctgccattgcccacttactacaccctgcccaatgccaccgtggctcctgaaacgcgggcagtaatcaagtggatgaagcggatcccctttgtgctaagtgccaacctccacgggggtgagctcgtggtgtcctacccattcgacatgactcgcaccccgtgggctgcccgcgagctcacgcccacaccagatgatgctgtgtttcgctggctcagcactgtctatgctggcagtaatctggccatgcaggacaccagccgccgaccctgccacagccaggacttctccgtgcacggcaacatcatcaacggggctgactggcacacggtccccgggagcatgaatgacttcagctacctacacaccaactgctttgaggtcactgtggagctgtcctgtgacaagttccctcacgagaatgaattgccccaggagtgggagaacaacaaagacgccctcctcacctacctggagcaggtgcgcatgggcattgcaggagtggtgagggacaaggacacggagcttgggattgctgacgctgtcattgccgtggatgggattaaccatgacgtgaccacggcgtggggcggggattattggcgtctgctgaccccaggggactacatggtgactgccagtgccgagggctaccattcagtgacacggaactgtcgggtcacctttgaagagggccccttcccctgcaatttcgtgctcaccaagactcccaaacagaggctgcgcgagctgctggcagctggggccaaggtgcccccggaccttcgcaggcgcctggagcggctaaggggacagaaggattga

SEQ ID NO: 5664 - protein, 734 aa, Homo sapiens
MWGLLLALAAFAPAVGPALGAPRNSVLGLAQPGTTKVPGSTPALHSSPAQPPAETANGTSEQHVRIRVIKKKKVIMKKRKKLTLTRPTPLVTAGPLVTPTPAGTLDPAEKQETGCPPLGLESLRVSDSRLEASSSQSFGLGPHRGRLNIQSGLEDGDLYDGAWCAEEQDADPWFQVDAGHPTRFSGVITQGRNSVWRYDWVTSYKVQFSNDSRTWWGSRNHSSGMDAVFPANSDPETPVLNLLPEPQVARFIRLLPQTWLQGGAPCLRAEILACPVSDPNDLFLEAPASGSSDPLDFQHHNYKAMRKLMKQVQEQCPNITRIYSIGKSYQGLKLYVMEMSDKPGEHELGEPEVRYVAGMHGNEALGRELLLLLMQFLCHEFLRGNPRVTRLLSEMRIHLLPSMNPDGYEIAYHRGSELVGWAEGRWNNQSIDLNHNFADLNTPLWEAQDDGKVPHIVPNHHLPLPTYYTLPNATVAPETRAVIKWMKRIPFVLSANLHGGELVVSYPFDMTRTPWAARELTPTPDDAVFRWLSTVYAGSNLAMQDTSRRPCHSQDFSVHGNIINGADWHTVPGSMNDFSYLHTNCFEVTVELSCDKFPHENELPQEWENNKDALLTYLEQVRMGIAGVVRDKDTELGIADAVIAVDGINHDVTTAWGGDYWRLLTPGDYMVTASAEGYHSVTRNCRVTFEEGPFPCNFVLTKTPKQRLRELLAAGAKVPPDLRRRLERLRGQKD

SEQ ID NO: 5665 - DNA, 2836 bp, Homo sapiens
gctgtgaggctcggagtcgccggaggagccagtatctgtgtcgccgccgcccgcggcgtccccggtttggtgctgcggcgcccaccttcgggaggatcagtatctggcaccaattctgacccagtcatttgtgatccctggctcttgtgatatgctgaagatttccaggcagtttttgtggaacacctccccgtccagctctaatcaagcaccatataaacaagaaattgcctggtcaaatctgtgaggactgtattctgactgccaaagagatcaatactgacaccagaatggcagctactctcaagtcattaaaacttgtaagataccgagcattttgcagtccttctgcctttggtgcagtccgaagtgtgtcatactggaatgtgagcagcacacagcatgggggacaggaccctccagaacacattagcctctgccattctgccaaaaaagttaagaacatatgtagcaccttctcttctcggagaatcctgacaaccagcagtgcccacccaggtttggaattcagcaagacttcttcctctaaggccagtacattgcagctgggctcacccagggccacaggagttgatgaagaggacgtagaagtgtttgattcctttgaaaacatgcgagttttcctacagctaagaccagaataccgtgttcacagctataatgcatctgagacttctcagctcctgtctgtttcagaaggtgaactaattttgcacaaagtcagagttaatcaaaataatctccaggctcaagtcattgttgattatttgtgtaagctgagctctttgcctgcagagcagcatcctgtcttgctgggcagtaccagctttgctctgctctgccagctgagtgtgaagaagatacagctctttgatacccaagatctgatcaatgttttgaaagcttttgtcattttaggaatccctcactcccattcaatgctagatgtgtatgagaccaagtgttgccatcaggtatgggagatgaatatggatcagctccttttggtggctgatctctggaggtacttaggccgcaaagtacctaggtttttaaacattttttctagttatcttaatttgcactggaaggatctatccttgtctcagctagttcacttaatttatgttataggtgaaaatcgtcaggtatcccaggacctaatgcaaaaattggaatcattgatccttaaatatatagatttgatcaatttggaggaggttggtaccatctgtttggggttctttaaatcaagtactaatctctctgaatttgtcatgcggaaaattggagacttggcttgtgctaacattcagcatctgagtagtcgctccttagtgaatattgttaaaatgttccgtttcactcacgtggatcacatcaatttcatgaagcagattggagagatagctcctcagcgaattccttccctgggagttcaaggtgtcatgcacctgactctttactgctcggccttacgcttcctgaatgaaggagtaatgaatgcagtggctgcgtctttgcctcctagagtggcacactgtcgaagtaaagatgttgccaagattctgtggtcatttggaactctgaattataagccacccaatgcagaagaattttactccagcctgataagtgagattcacagaaagatgcctgaattcaaccagtacccagaacacctgcccacctgcctgctgggcctggcatttttggagtactttccagtagagttaattgatttcgctctcagtccagggtttgtcaggttagctcaggagagaactaagtttgacctccttaaggaactatataccctcgatggtacagttggcattgagtgtccagattacagaggcaatcgtcttagtactcaccttcagcaagaggggtctgaattgctgtggtatttagcagagaaggatatgaattcaaagcctgaattcttagaaactgtctttttactggagaccatgctgggggggccccagtacgtcaagcaccatatgattttgcctcatacccgatcttctgacttagaagtccagcttgatgttaacctgaagccattaccatttaatagagaagccacgccggctgaaaatgtagccaaattaaggcttgagcatgtgggagtcagccttacagatgatttgatgaataagttactaaaagggaaagcaagaggacatttccagggcaaaactgagtcagagcctgggcagcagcccatggagttggagaataaggcagctgtacctctggggggcttcctttgcaatgtagcagataaatcaggggccatggagatggctggcctgtgccccgcagcctgcatgcagaccccaagaatgaagctggctgttcagttcacaaacaggaaccagtattgctatggctccagggatctccttggactgcacaatatgaagaggcggcagctggctcggcttggctaccgtgtggtagagttatcctactgggaatggctcccactactgaaacgaactcgcttagaaaagttggcgtttcttcatgagaaagtattcacctctgctctctgaagggcatttaggggcatttctatggcaaagctataggtgtatactgtaccaggtgttgcaaaatgattataaaagccagaatgtaagtttggcgataaaatagtgtgttgaggagacttaattgtatccaaggcaggttagagctagtgtatgttactgtgaattgtaatgtagttggattgtacaaattactgcaaatgtatacatgttactcttagtaaataataaacatcttaatatgtcctacggtc

SEQ ID NO: 5666 - protein, 764 aa, Homo sapiens
MAATLKSLKLVRYRAFCSPSAFGAVRSVSYWNVSSTQHGGQDPPEHISLCHSAKKVKNICSTFSSRRILTTSSAHPGLEFSKTSSSKASTLQLGSPRATGVDEEDVEVFDSFENMRVFLQLRPEYRVHSYNASETSQLLSVSEGELILHKVRVNQNNLQAQVIVDYLCKLSSLPAEQHPVLLGSTSFALLCQLSVKKIQLFDTQDLINVLKAFVILGIPHSHSMLDVYETKCCHQVWEMNMDQLLLVADLWRYLGRKVPRFLNIFSSYLNLHWKDLSLSQLVHLIYVIGENRQVSQDLMQKLESLILKYIDLINLEEVGTICLGFFKSSTNLSEFVMRKIGDLACANIQHLSSRSLVNIVKMFRFTHVDHINFMKQIGEIAPQRIPSLGVQGVMHLTLYCSALRFLNEGVMNAVAASLPPRVAHCRSKDVAKILWSFGTLNYKPPNAEEFYSSLISEIHRKMPEFNQYPEHLPTCLLGLAFLEYFPVELIDFALSPGFVRLAQERTKFDLLKELYTLDGTVGIECPDYRGNRLSTHLQQEGSELLWYLAEKDMNSKPEFLETVFLLETMLGGPQYVKHHMILPHTRSSDLEVQLDVNLKPLPFNREATPAENVAKLRLEHVGVSLTDDLMNKLLKGKARGHFQGKTESEPGQQPMELENKAAVPLGGFLCNVADKSGAMEMAGLCPAACMQTPRMKLAVQFTNRNQYCYGSRDLLGLHNMKRRQLARLGYRVVELSYWEWLPLLKRTRLEKLAFLHEKVFTSAL

SEQ ID NO: 5667 - DNA, 1085 bp, Homo sapiens
cctggccggaaactgagccgttcacttccgccaccagccggaagttttctgtcactggacgccaaggagttttcggtggctcagctgggtaaccggggatcaccatggcggcctcattggtggggaagaagatcgtgtttgtaacggggaacgccaagaagctggaggaggtcgttcagattctaggagataagtttccatgcactttggtggcacagaaaattgacctgccggagtaccagggggagccggatgagatttccatacagaaatgtcaggaggcagttcgccaggtacaggggcccgtgctggttgaggacacttgtctgtgcttcaatgcccttggagggctccccggcccctacataaagtggtttctggagaagttaaagcctgaaggtctccaccagctcctggccgggttcgaggacaagtcagcctatgcgctctgcacgtttgcactcagcaccggggacccaagccagcccgtgcgcctgttcaggggccggacctcgggccggatcgtggcacccagaggctgccaggactttggctgggacccctgctttcagcctgatggatatgagcagacgtacgcagagatgcctaaggcggagaagaacgctgtctcccatcgcttccgggccctgctggagctgcaggagtactttggcagtttggcagcttgacttctgcagctggaggaggcccctcaggccggggatctggggagggctagcccaaaacctcccgcatcgggcaggcaccccctgaagtacttccttcagggtttcccctttgtgagggtgtcgagtagcctcaccggcctgtctggaggagcagctggctctgctctgagaaactctggcaagtggacgccattctcttgcccttaggattcactgctctctcctacagccgccaggcctggggtcctgaaaggaccttgggtggtaaagctgtacttggtgggagtgagggcgtggggaggaaccatgcaaatcgccttccatggtttttaaatgcagtaaataacatttctggatgagacttgtttccaaaataaaccagctatatctgttttg

SEQ ID NO: 5668 - DNA, 1282 bp, Homo sapiens
gtgctcggcgttgagctcctgcagccgccgccgctgcagtggtcgtccctgccctccccggccccggggtgcaccccgcaaggctcccgctggtgtccctggagcatgggaggctgctgagcgtgagtggcggtgtctggcaggagctgcgtggcagggagggcgtccatggctgcagccaacaagggcaacaagcccagagtccggggtatccgctttgcggcaggccacgatgcagaaggatcccacagccacgtccactttgatgagaagctgcatgactcggtggtcatggtcacccaggagagtgacagcagctttctggtcaaggttggcttcctgaagatcctgcacaggtatgagattaccttcactctgcccccagtgcacaggctgagcaaggatgtccgcgaggcacctgtccccagcctgcacctcaagctcctcagcgtggtgcccgtccctgaaggttatagtgtcaagtgtgagtactcggcgcacaaagagggcgtcctcaaagaggagatactgctagcctgcgaaggtggcactggcacctgtgtgcgcgtgacggtgcaggcccgcgtcatggaccggcaccacggcacgcccatgctgctggatggtgtcaagtgtgtgggcgccgagctggaatacgactcagagcacagcgactggcacggctttgactgaggcccgaggccccgcctgccccgggcccctcagccttaaaccccgccttgtccccccgacatgctgcgtgatggtgtggcttcctcgcccctctctggggtgggtgtgggggtggagtggccttgcccacgcctctcacctctgccttcatttgtgctgccaccctgcccctccctcgtcctcctctcccacttcctcctctctgtgtgcctcagtctcctgccggaagaaatgggttgatcccgaaaggaggctgtctgaggaagggagagggagggcctggggtgggtcccccactccccaccccaagccacagggactcccaccagggtctgggagaggacggagctggctctgtggcgtcgtggccccattactgctgccttgcttcagccacctctcctgcccctccctagtccccactgctgtccaccatgagtaggagggaggtgcagtccccagcccccacccctcaggtctgtgttacttggtttttaagcgactggttgggatagaaccctaaagaaataaacttccagtggataaaaaaaaaaaaaaaaaaaaaaaaaaaaaaaaaaaaaaaaaaaaa

SEQ ID NO: 5669 - protein, 174 aa, Homo sapiens
MAAANKGNKPRVRGIRFAAGHDAEGSHSHVHFDEKLHDSVVMVTQESDSSFLVKVGFLKILHRYEITFTLPPVHRLSKDVREAPVPSLHLKLLSVVPVPEGYSVKCEYSAHKEGVLKEEILLACEGGTGTCVRVTVQARVMDRHHGTPMLLDGVKCVGAELEYDSEHSDWHGFD

SEQ ID NO: 5670 - DNA, 339 bp, Homo sapiens
actttgccatggtcaagaggtacctgacctccttccccattgatgaccgcgtgcagagccacatcctccacttggaacacgatctggttcatgtgaccaggaagaaccacgccaggattggaggtttccaagaggccccccaccgtggaagtaaccaagggcgcttccttgtgggcagctgcaggccccatgcctctcctccctctctggcagggccccatcctgggcagaggggcctggggctgggcccagagtccagccgtccagctgctcctttcccagtttgatttcaataaatctgtccactccccttttgtgggggtgaacgttttaacagcc

SEQ ID NO: 5671 - DNA, 2616 bp, Homo sapiens
cgacagctgacgttccgggagaagtcacggatcatccaggaggtggaggagaatccggacctgcgcaagggcgagatcgcgcggcgcttcaacatcccgccgtccacgctgagcacgatcctgaagaacaagcgcgccatcctggcgtcggagcgcaagtacggggtggcctccacctgccgcaagaccaacaagctgtctccctacgacaagctcgagggcttgctcatcgcctggttccagcagatccgcgccgccggcctgccggtcaagggcatcatcctcaaggagaaggcgctgcgcatagccgaggagctgggcatggacgacttcaccgcctccaacggctggctggaccgcttccgccggcgccacggcgtggtgtcctgcagcggcgtggcccgcgcccgcgcgcgaaacgctgccccccgcaccccggcggcgcctgccagtccggccgcggtgccctcggagggcagtggcgggagcactactggttggcgcgctcgggaggagcagccgccgtcggtggccgagggctacgcctcgcaggacgtgttcagcgccaccgagaccagtctatggtacgacttcctgcccgaccaggccgcggggctgtgcggaggcgacggacggccgcgtcaagccacccagcgcctgagcgtcctgctatgcgccaatgccgacggcagcgagaagctgcccccgctggtggccggcaagtcggccaagccccgcgcaggccaagccggcctgccctgcgactacaccgccaactccaagggtggtgtcaccacccaggccctggccaagtacttgaaggccttggacacccgaatggctgcagagtctcgccgggtcctgctgttggccggccgcttggctgcccagtccttggacacctcgggcctgcggcatgtgcagctggccttcttccctcccggcaccgtgcatccgctggagaggggagtggtccagcaggtgaagggccactaccgccaggccatgctgctcaaggccatggccgcgctagagggccaggatccctcaggcctgcagctgggtctcacggaggccctgcactttgtggctgccgcctggcaggcagtggagccttcggacatagccgcctgctttcgtgaggctggctttgggggtggccctaatgccaccatcaccacttccctcaagagtgagggagaggaagaggaggaggaggaggaagaagaggaggaggaagagggtgaaggagaggaagaggaggaggaaggggaggaggaggaggaggaagggggggaaggagaggaattgggggaggaagaggaggtggaggaggagggtgatgttgatagtgatgaagaagaggaggaagatgaggagagctcctcggagggcttggaggctgaggactgggcccagggagtagtggaggccggtggcagcttcggggcttatggtgcccaggaggaagcccagtgccctactctgcatttcctggaaggtggggaggactctgattcagacagtgaggaagaggacgatgaggaagaggatgatgaagatgaagacgacgatgatgatgaggaggatggtgatgaggtgcctgtacccagctttggggaggccatggcttactttgccatggtcaagaggtacctgacctccttccccattgatgaccgcgtgcagagccacatcctccacttggaacacgatctggttcatgtgaccaggaagaaccacgccaggcaggcgggagttcgaggtcttggacatcaaagctgagtcactggacctagctgtgcccccaacctagattggcagcaccaccccagggcagaggactctctgggcacccgctgtgcatggagccagagtgcagagccccagatcctttagtaatgcttcccctggtcctgcaacaggcccggtcacctcggccgggcccggggctgaggtcagcctcactgcctgcttattgcctctttctcagaatcctctttcctccccatttggccctgggctcaggggaccaggtggggcgggtggggagctgtccggtgctaccacaccgtgccctcagtggactaaccacagcagcagccagggatgggccctggaggttcccggccggagagtgcctctcccctctgccatccacgtcaggtctttggtggggggaccccaaagccattctgggaagggctccagaagaaggtccagcctaggccccctgcaaggctggcagcccccacccccaccccccaggccgccttgagaagcacagtttaactcactgcgggctcctgagcctgcttctgcctgctttccacctccccagtccctttctctggccctgtccatgtgactttggcccttggttttctttccagattggaggtttccaagaggccccccaccgtggaagtaaccaagggcgcttccttgtgggcagctgcaggccccatgcctctcctccctctctggcagggccccatcctgggcagaggggcctggggctgggcccagagtccagccgtccagctgctcctttcccagtttgatttcaataaatctgtccactccccttttgtgggggtgaacgttttaacagcc

SEQ ID NO: 5672 - protein, 487 aa, Homo sapiens
MDDFTASNGWLDRFRRRHGVVSCSGVARARARNAAPRTPAAPASPAAVPSEGSGGSTTGWRAREEQPPSVAEGYASQDVFSATETSLWYDFLPDQAAGLCGGDGRPRQATQRLSVLLCANADGSEKLPPLVAGKSAKPRAGQAGLPCDYTANSKGGVTTQALAKYLKALDTRMAAESRRVLLLAGRLAAQSLDTSGLRHVQLAFFPPGTVHPLERGVVQQVKGHYRQAMLLKAMAALEGQDPSGLQLGLTEALHFVAAAWQAVEPSDIAACFREAGFGGGPNATITTSLKSEGEEEEEEEEEEEEEEGEGEEEEEEGEEEEEEGGEGEELGEEEEVEEEGDVDSDEEEEEDEESSSEGLEAEDWAQGVVEAGGSFGAYGAQEEAQCPTLHFLEGGEDSDSDSEEEDDEEEDDEDEDDDDDEEDGDEVPVPSFGEAMAYFAMVKRYLTSFPIDDRVQSHILHLEHDLVHVTRKNHARQAGVRGLGHQS

SEQ ID NO: 5673 - DNA, 555 bp, Homo sapiens
atgggccccaagaggcgacagctgacgttccgggagaagtcacggatcatccaggaggtggaggagaatccggacctgcgcaagggcgagatcgcgcggcgcttcaacatcccgccgtccacgctgagcacgatcctgaagaacaagcgcgccatcctggcgtcggagcgcaagtacggggtggcctccacctgccgcaagaccaacaagctgtctccctacgacaagctcgagggcttgctcatcgcctggttccagcagatccgcgccgccggcctgccggtcaagggcatcatcctcaaggagaaggcgctgcgcatagccgaggagctgggcatggacgacttcaccgcctccaacggctggctggaccgcgtacccagctttggggaggccatggcttactttgccatggtcaagaggtacctgacctccttccccattgatgaccgcgtgcagagccacatcctccacttggaacacgatctggttcatgtgaccaggaagaaccacgccaggcaggcgggagttcgaggtcttggacatcaaagctga

SEQ ID NO: 5674 - DNA, 3179 bp, Homo sapiens
agaggcttccctggctggtgcctgagcccggcgtccctcgccccccgccctccccgcatccctctcctccctcgcgcctggccctgtggctcttcctccctccctccttccccccccccccacccctcgcccgctgcctccctcggcccagccagctgtgccggcgtttgttggctgccctgcgcccggccctccagccagccttctgccggccccgccgcgatggaggtgccccagccggagcccgcgccaggctcggctctcagtccagcaggcgtgtgcggtggcgcccagcgtccgggccacctcccgggcctcctgctgggatctcatggcctcctggggtccccggtgcgggcggccgcttcctcgccggtcaccaccctcacccagaccatgcacgacctcgccgggctcggcagccgcagccgcctgacgcacctatccctgtctcgacgggcatccgaatcctccctgtcgtctgaatcctccgaatcttctgatgcaggtctctgcatggattcccccagccctatggacccccacatggcggagcagacgtttgaacaggccatccaggcagccagccggatcattcgaaacgagcagtttgccatcagacgcttccagtctatgccggtgaggctgctgggccacagccccgtgcttcggaacatcaccaactcccaggcgcccgacggccggaggaagagcgaggcgggcagtggagctgccagcagctctggggaagacaaggagaatgtgcgcttctggaaggccggggtgggagctctccgggaagaggagggggcatgctggggtggttccctggcatgtgaggaccctcctctcccatcttggctgcaggatggatttgtcttcaagatgccatggaagcccacacatcccagctccacccatgctctggcagagtgggccagccgcagggaagcctttgcccagagacccagctcggcccccgacctgatgtgtctcagtcctgaccggaagatggaagtggaggagctcagccccctggccctaggtcgcttctctctgacccctgcagagggggatactgaggaagatgatggatttgtggacatcctagagagtgacttaaaggatgatgatgcagttcccccaggcatggagagtctcattagtgccccactggtcaagaccttggaaaaggaagaggaaaaggacctcgtcatgtacagcaagtgccagcggctcttccgctctccgtccatgccctgcagcgtgatccggcccatcctcaagaggctggagcggccccaggacagggacacgcccgtgcagaataagcggaggcggagcgtgacccctcctgaggagcagcaggaggctgaggaacctaaagcccgcgtcctccgctcaaaatcactgtgtcacgatgagatcgagaacctcctggacagtgaccaccgagagctgattggagattactctaaggccttcctcctacagacagtagacggaaagcaccaagacctcaagtacatctcaccagaaacgatggtggccctattgacgggcaagttcagcaacatcgtggataagtttgtgattgtagactgcagatacccctatgaatatgaaggcgggcacatcaagactgcggtgaacttgcccctggaacgcgacgccgagagcttcctactgaagagccccatcgcgccctgtagcctggacaagagagtcatcctcattttccactgtgaattctcatctgagcgtgggccccgcatgtgccgtttcatcagggaacgagaccgtgctgtcaacgactaccccagcctctactaccctgagatgtatatcctgaaaggcggctacaaggagttcttccctcagcacccgaacttctgtgaaccccaggactaccggcccatgaaccacgaggccttcaaggatgagctaaagaccttccgcctcaagactcgcagctgggctggggagcggagccggcgggagctctgtagccggctgcaggaccagtgaggggcctgcgccagtcctgctacctcccttgcctttcgaggcctgaagccagctgccctatgggcctgccgggctgagggcctgctggaggcctcaggtgctgtccatgggaaagatggtgtgggtgtcctgcctgtctgccccagcccagattcccctgtgtcatcccatcattttccatatcctggtgccccccacccctggaagagcccagtctgttgagttagttaagttgggttaataccagcttaaaggcagtattttgtgtcctccaggagcttcttgtttccttgttagggttaacccttcatcttcctgtgtcctgaaacgctcctttgtgtgtgtgtcagctgaggctgggggagagccgtggtccctgaggatgggtcagagctaaactccttcctggcctgagagtcagctctctgccctgtgtacttcccgggccagggctgcccctaatctctgtaggaaccgtggtatgtctgccatgttgcccctttctcttttcccctttcctgtcccaccatacgagcacctccagcctgaacagaagctcttactctttcctatttcagtgttacctgtgtgcttggtctgtttgactttacgcccatctcaggacacttccgtagactgtttaggttcccctgtcaaatatcagttacccactcggtcccagttttgttgccccagaaagggatgttattatccttgggggctcccagggcaagggttaaggcctgaatcatgagcctgctggaagcccagcccctactgctgtgaaccctggggcctgactgctcagaacttgctgctgtcttgttgcggatggatggaaggttggatggatgggtggatggccgtggatggccgtggatgcgcagtgccttgcatacccaaaccaggtgggagcgttttgttgagcatgacagcctgcagcaggaatatatgtgtgcctatttgtgtggacaaaaatatttacacttagggtttggagctattcaagaggaaatgtcacagaagcagctaaaccaaggactgagcaccctctggattctgaatctcaagatgggggcagggctgtgcttgaaggccctgctgagtcatctgttagggccttggttcaataaagcactgagcaagttgag

SEQ ID NO: 5675 - DNA, 760 bp, Homo sapiens
gggtctgtctcttgcttcaacagtgtttggacggaacagatccggggacggtcttccagcctccgaccgccctccaatttcctctccacttgcaacctccgggaccatcttctcggctatctcctgcttctgggacctgccagcaccgtttttgtcgttagctccttcttggcgaccaaccatgagctcccagattcgtcaaaattattccaccgacgtggaggcagccgtcaacagcctggtcaatttgtacctgcaggcctcctacacctacctctctctgggcttctatttcgaccgcgatgatgcggctctggaaggcgtgagccacttcttccgcgaattgaccgaggagaagcgcgagggctacgagcgtctcctgaagatgcaaaaccagcgtggcggccgcgctctcttccaggacatcaagaagccagctgaagatgagtggggtaaaaccccagatgccatgaaagctgccatggccctggagaacccccatctctgtgacttcctggagactcacttcctagatgaggaagtgaagctcatcaagaagatgggtgaccacctgacgaacctccacaggctgggaggcccagaggctgggctgggcgagtatctcttcgaaaggctcactctcaagcacgtctaagagccttatgagcccagcgacttctgaagggccccttgcaaagtaatagggcttctgcctaagcctctccctccagccaataggcagctttcttaactaccctaa

SEQ ID NO: 5676 - DNA, 5426 bp, Homo sapiens
ggggaggaagaaaggcgaaggcaaggcgaaggggtggagagtgatatgaagagcgagagaaaagagaggacagcggacgagcagatccggtatctggaatcccggcgcctagaacgtgtttttcgggagagcaaaggctgtgtctacggcaggctggggatatagcctctccttccgatgaaaagagaaaggaagaatggactacagccaccaaacgtccctagtcccatgtggacaagataaatacatttccaaaaatgaacttctcttgcatctgaagacctacaacttgtactatgaaggccagaatttacagctccggcaccgggaggaagaagacgagttcattgtggaggggctcctgaacatctcctggggcctgcgccggcccattcgcctgcagatgcaggatgacaacgaacgcattcgaccccctccatcctcctcctcctggcactctggctgtaacctgggggctcagggaaccactctgaagcccctgactgtgcccaaagttcagatctcagaggtggatgccccgccggagggtgaccagatgccaagctccacagactccaggggcctgaagcccctgcaggaggacaccccacagctgatgcgcacacgcagtgatgttggggtgcgtcgccgtggcaatgtgaggacgcctagtgaccagcggcgaatcagacgccaccgcttctccatcaacggccatttctacaaccataagacatccgtgttcacaccagcctatggctctgtcaccaacgtccgcatcaacagcaccatgaccaccccacaggtcctgaagctgctgctcaacaaatttaagattgagaattcagcagaggagtttgccttgtacgtggtccatacgagtggtgagaaacagaagctgaaggccaccgattacccgctgattgcccgaatcctccagggcccatgtgagcagatctccaaagtgttcctaatggagaaggaccaggtggaggaagtcacctacgacgtggcccagtatataaagttcgagatgccggtacttaaaagcttcattcagaagctccaggaggaagaagatcgggaagtaaagaagctgatgcgcaagtacaccgtgctccggctaatgattcgacagaggctggaggagatagccgagaccccagcaacaatctgagccatgagaacgaggggatctgggcaccccaggaaccgccattgcccataagacccccaggaagctaggcactttctttccatggaaacatttagacacaaacctccccagctccggccaagccatcatttgctacctggagctggatgtagaagtcagcagacagctccctatccctggacccctgccctccttttttctgctcacaaggacttttgattttagttataaggaggacccaaaatgtgtgtgtgtacatgtgtgtgcacacatggtacgtgtccatgtgcctacctgatactttcacatgtaattaaattccaggcaaccagcacaagagccgtgagcttggcacatgtgctgctcgtgagcaggaaaatcagaggagccactgatctgagtggtatttaggttgaaggaaagatttctcctctcaagtgccagggagcagccacacgtctgtctgtgtttagagagggaagagggttctccaggttcaccatttgggttgtttatatgttggtagaaattctccctgtatgcctagaaggatcagtgaatgtaagagccttggaaattaacaaaataacagccacataaccttgcggcaagtctgatggaaagaaaaagataaaccatccgtggggtagatgcaataagcccacgtatttttacactggaaacgttgattgttttaaatgacaaagacatatgtgatgttctatgtggaaacctgtgaagagtggattctgcctccatctctgcctccatggctacctttaggagacagagaagatcctgtgtgtttctctgtacccagctgacagcctgtctctatggcgcttccttgagtggaaggaaatgtctcaagaaacaaagatctcgctggtgcgtacacagtgctgaccagctagtgtggccagggcctggtggcctggtggccaggaagtttcaggttgaagggaaatgtcgaggctacctgcagatatgacaggtgccttgaacgcagcccatcttcatgtcatcaaaggtcttcctgcacttgaagctggggcgatgtttgcagtcaagaccattctttccaacctctgggttcttgcaagttgccctcaccttgtgtgtggagatgcattccaagaatgaagcctcatcttgctactgagtgtggggttcagggaagctctttaggccacctggtgaaggtgcatggggaggatggagcttctcctcagctcctctgagcagccacctatgtgatctttaaatccaaccccaatgggagaaaagggcaagaacagtctgtgccctgggactcctatcaggaagcttgacaggcagctgggcatcagtgcagctgatatcgtttgaggagggagacagatgcttggacctgggtgcctggctatggagattgaccaagcaagatcaggagctcctgatagcaggcgtctttgagcctagctggggtagaggcactgcccatctcttctccaccttctctccacagaatgtttgcagagctgggcagttgaggaaaggacagcccctggttggtgcctccaaaggaaggtggacttttttggtggagacgtttctgccctgggcaccctcctgcccccgattcatacctatggcttcttgagaaggctcacagctgtggtcttaacgtagactgcagaaagatggcatgcggcccctggcatttcgccaagggttttatagcaagtctccttcctccatagggacagcagcaccagccctgtggggcatggagtggaagcccagaagggcttctgcaagctgcacagaactggggtaagaagacaaagagtagccaccgggagaggcttcctttgttacagctgggaaagaacagttctgtgaatgcaaacacctcctgagttttgcaattgagaaaatgatttggagaacttctcttctggtaatttttattttgaatgttcagggccttagttggccccagtaattctccttggaggacttgggagaagaatttccacaaagcaaactactaaccactagctcttactggacagcgatttctggcttataagagttctctttgatttgcactagcactacgatagtgttagatggggaaatactgcaacatgtccagttggccagatcactttccaagggagcgatactaaggcagactcagctttttaaagatgggaggtcaggaggtggaagtgagaggagatcccatctcacacaacacacttccacgtaatgcagaccacacttttccattttgtcctgccctcttgagaggtcatttctcacgtcctaagaacctgatcagaaattttggaagggttctttgaaatagcagcagttgaaacagagacactttgccacagtgtggagcagattttctcactggtatcacatggtcttgcagttttgaactcttcgaccgatttgtgggagtttatgtaattgcgtgcaatgaacctgaaattgtgtaaaggacaaaagaccagtttatagggttgggttttttttccaacttgtgaaaagcagtttagctgcatctgtctccccaccacccccaccccgggaggggcttatgttacaaggtgatcaagtgaaggaaaaacctgagcctatctggctgggatggtggaattaagcacaaggtcacattctctgtgatcacatgagagggaaggtgatgacttaaatggcagggggtggggattatcttggggagaggctgaaaagcacaaaagatagtcttccctgtacgtattggtgaagaacgtgcacaaggctggatggacttcaacttggagttgagttgaggcaagaggatttctggatattagtcacccatctgcaagaaaaatgctgaggcctcgggtcaagattttgatctgagacatgctgatgcttcaaggagaaatattttcacaatcctctcttccctcaccagaagagaacagtactctctcctagaaacctctaggtaaacacattttatcctaatatcggtagcatataatgccccccccaaaatatctgttttccatgcaaaaaagtctcaacaagaagtctgtggagttgagtggttacttcaaagtgtcaggagagtgaagaaattggccacagaagagcaagaagctctcttaagaaaagggaattctctttaaagaaaccaccaccaacaacaaaacaaccaaaaaccatgttttatgtcaaagctctgtagcacagagaatgtggtgtcacagatacatcgccgagagaggtttctttctttcttttttttttttttgagacagagtctggttctgtttcccaggctggagtgcagtggtgggatctcagctcactgcaacatccgcctctggggttcaagtgattctcctgtctcagcctcccaagtagctggaattacagggacccgccaccacgcccggctaatttttttgtgtggttttagtagaggtggggtttcaccatcttggccaggctggtcttgaactcctgacctcgtgatccacccgcctaggcctcccaaagtgttgggattacaggcgtgagccactgtgcccagccaaaagagaaatttctacatgaacaaggcaatttcagtgtcttacagcggccaaaccatgacgtgaagaatgagataggagacaggagatcaccataagcgtccctgatatagcagcacacattttcacgtttccacttaaatcgttttgcacaaagtcttgcttcgctcagatgagatgagatatgatttcctagagatgtaaaaataagaatgaatgtggcgcccccttcttccagatgtaatagaaagctctgccctatcacaaggggggtgttgaagcgccccttgtgttttaactgtatttaactgagcacaagatgcacaagctgtggtgggaaaccctcagtttacctttggagtcttccctgcagatcgcagacctgtttccaggctgatgtttctggtgtgtaattgctagcgtttctgaagggttttcccaattgttttagccttgtgaagtattcttaattataacttgcctttcagcgatggtacatgacttgattcaacgtttggttctgaacttacacactgatgcgtttactcatctaacataatctgacagggcctcagcaagggagccatacatttttgtaacattttgatatgttttaatgcatctgacttagatcttactgaaataaagcacttttcaaagag

SEQ ID NO: 5677 - protein, 326 aa, Homo sapiens
MDYSHQTSLVPCGQDKYISKNELLLHLKTYNLYYEGQNLQLRHREEEDEFIVEGLLNISWGLRRPIRLQMQDDNERIRPPPSSSSWHSGCNLGAQGTTLKPLTVPKVQISEVDAPPEGDQMPSSTDSRGLKPLQEDTPQLMRTRSDVGVRRRGNVRTPSDQRRIRRHRFSINGHFYNHKTSVFTPAYGSVTNVRINSTMTTPQVLKLLLNKFKIENSAEEFALYVVHTSGEKQKLKATDYPLIARILQGPCEQISKVFLMEKDQVEEVTYDVAQYIKFEMPVLKSFIQKLQEEEDREVKKLMRKYTVLRLMIRQRLEEIAETPATI

SEQ ID NO: 5678 - DNA, 1224 bp, Homo sapiens
gtctcagccggtcgtcgcgacgttcgcccgctcgctctgaggctcctgaagccgaaaccagctagactttcctccttcccgcctgcctgtagcggcgttgttgccactccgccaccatgttcgaggcgcgcctggtccagggctccatcctcaagaaggtgttggaggcactcaaggacctcatcaacgaggcctgctgggatattagctccagcggtgtaaacctgcagagcatggactcgtcccacgtctctttggtgcagctcaccctgcggtctgagggcttcgacacctaccgctgcgaccgcaacctggccatgggcgtgaacctcaccagtatgtccaaaatactaaaatgcgccggcaatgaagatatcattacactaagggccgaagataacgcggataccttggcgctagtatttgaagcaccaaaccaggagaaagtttcagactatgaaatgaagttgatggatttagatgttgaacaacttggaattccagaacaggagtacagctgtgtagtaaagatgccttctggtgaatttgcacgtatatgccgagatctcagccatattggagatgctgttgtaatttcctgtgcaaaagacggagtgaaattttctgcaagtggagaacttggaaatggaaacattaaattgtcacagacaagtaatgtcgataaagaggaggaagctgttaccatagagatgaatgaaccagttcaactaacttttgcactgaggtacctgaacttctttacaaaagccactccactctcttcaacggtgacactcagtatgtctgcagatgtaccccttgttgtagagtataaaattgcggatatgggacacttaaaatactacttggctcccaagatcgaggatgaagaaggatcttaggcattcttaaaattcaagaaaataaaactaagctctttgagaactgcttctaagatgccagcatatactgaagtcttttctgtcaccaaatttgtacctctaagtacatatgtagatattgttttctgtaaataacctatttttttctctattctctgcaatttgtttaaagaataaagtccaaagtcagatctggtctagttaacctagaagtatttttgtctcttagaaatacttgtgatttttataatacaaaagggtcttgactctaaatgcagttttaagaattgtttttgaatttaaataaagttacttgaatttc

SEQ ID NO: 5679 - DNA, 2454 bp, Homo sapiens
ccaggaggcacgctggttttccggggccgctccatcgcgccttcctcctgcgcctcgcttctccggtccagccgccatcttcctttccgcacaggggccgccgagcggggccatgcagccaacgctgcttctcagcctcctgggagccgtggggctggcggctgtcaattccatgccagtggataacaggaaccacaatgaaggaatggtgactcgctgcatcattgaggtcctctcaaatgccttgtcgaagtccagcgctccacccatcacccctgagtgccgccaagtcctgaagacgagtagaaaagacgtcaaagacaaagagacaactgaaaatgaaaacacaaagtttgaagtaagattgttaagagacccagctgatgcctcggaagcccacgagtcctccagcaggggagaggcaggagccccaggggaggaggacatccaaggcccaacaaaggcagacacagagaaatgggcagagggaggcgggcacagccgagagcgagcggatgagccccagtggagcctctatccctccgacagccaagtctctgaagaagtgaagacacgccattctgagaagagccagagagaggatgaggaggaggaggagggagagaactatcaaaaaggggagcgaggggaagatagcagtgaagagaaacaccttgaagagccaggagagacacaaaacgcttttctcaatgaaagaaagcaggcttcagctataaaaaaagaggagttagtggccagatcggaaacacatgctgccgggcattctcaggagaagacacatagccgagagaagagtagccaggagagtggagaggaggcagggagccaggagaatcacccccaggagtctaaaggccaaccccgaagccaggaagaatctgaggaaggtgaggaagatgccacctctgaggtggacaaacgacgcacgaggcccagacaccaccacgggaggagcaggcccgacaggtcctctcaaggagggagtcttccctctgaggaaaagggacacccccaggaggaatctgaggagtcaaacgtcagcatggccagtttaggggaaaagagggaccaccattcaacccactacagggcttcagaggaagaacctgaatatggagaagaaataaagggttatccaggcgtccaggcccctgaggacctggagtgggagcgctataggggcagaggaagtgaagaatacagggctccaagacctcagagtgaggagagttgggatgaggaggacaagagaaactaccccagcttagagcttgataagatggcacatggatatggtgaagaaagtgaggaagagaggggccttgagccgggaaagggacgccatcacagaggcaggggaggggagccacgtgcctatttcatgtctgacaccagagaagagaaaaggttcttgggtgaaggacaccaccgtgtccaagaaaaccagatggacaaggcaaggaggcatccacaaggtgcgtggaaagagctggacagaaattatctcaactacggtgaggaaggagccccagggaagtggcagcagcagggagacctgcaggacactaaagaaaacagggaggaagctaggtttcaagataaacaatatagctcccatcacacagctgaaaagaggaagagattaggggaactgttcaacccatactacgaccctctccagtggaagagcagccattttgaaagaagagacaacatgaatgacaattttctcgagggtgaggaggaaaatgagctgaccttgaacgagaagaatttcttcccagaatacaactatgactggtgggagaaaaagcccttctctgaggatgtgaactgggggtatgagaagagaaacctcgccagggtccccaagctggacctgaaaaggcaatatgacagggtggcccaactggaccagctccttcactacaggaagaagtcagctgagtttccagacttctatgattctgaggagccggtgagcacccaccaggaggcagaaaatgaaaaggacagggctgaccagacagtcctgacagaggacgagaaaaaagaactcgaaaacttggctgcaatggatttggaactacagaagatagctgagaaattcagccaaaggggctgactgtcattggagcggtgggcactgttaagaagcagccatcacatgatctgtttttcaccacttcactgaaagacaccatttatatacccaagggcagaaagtagaacttactattcattaaatgtttgacacaattggaattgtctttaatttctgtcagaatgctattgaaaatgtgaattgcatgacttgtagcatattcttttctgcaaaatagacatattaacatgcttatgacaatgactgtgctactgtctttggaaaaatgtttgtctcagttggaaataataaaagattcacctgagacc

SEQ ID NO: 5680 - protein, 677 aa, Homo sapiens
MQPTLLLSLLGAVGLAAVNSMPVDNRNHNEGMVTRCIIEVLSNALSKSSAPPITPECRQVLKTSRKDVKDKETTENENTKFEVRLLRDPADASEAHESSSRGEAGAPGEEDIQGPTKADTEKWAEGGGHSRERADEPQWSLYPSDSQVSEEVKTRHSEKSQREDEEEEEGENYQKGERGEDSSEEKHLEEPGETQNAFLNERKQASAIKKEELVARSETHAAGHSQEKTHSREKSSQESGEEAGSQENHPQESKGQPRSQEESEEGEEDATSEVDKRRTRPRHHHGRSRPDRSSQGGSLPSEEKGHPQEESEESNVSMASLGEKRDHHSTHYRASEEEPEYGEEIKGYPGVQAPEDLEWERYRGRGSEEYRAPRPQSEESWDEEDKRNYPSLELDKMAHGYGEESEEERGLEPGKGRHHRGRGGEPRAYFMSDTREEKRFLGEGHHRVQENQMDKARRHPQGAWKELDRNYLNYGEEGAPGKWQQQGDLQDTKENREEARFQDKQYSSHHTAEKRKRLGELFNPYYDPLQWKSSHFERRDNMNDNFLEGEEENELTLNEKNFFPEYNYDWWEKKPFSEDVNWGYEKRNLARVPKLDLKRQYDRVAQLDQLLHYRKKSAEFPDFYDSEEPVSTHQEAENEKDRADQTVLTEDEKKELENLAAMDLELQKIAEKFSQRG

SEQ ID NO: 5681 - DNA, 906 bp, Homo sapiens
atgctagccttgcgcgtggcgcgcggctcgtggggggccctgcgcggcgccgcttgggctccgggaacgcggccgagtaagcgacgcgcctgctgggccctgctgccgcccgtgccctgctgcttgggctgcctggccgaacgctggaggctgcgtccggccgctcttggcttgcggctgcccgggatcggccagcggaaccactgttcgggcgcggggaaggcggctcccaggccagcggccggagcgggcgccgctgccgaagccccgggcggccagtggggcccggcgagcacccccagcctgtatgaaaacccatggacaatcccgaatatgttgtcaatgacgagaattggcttggccccagttctgggctatttgattattgaagaagattttaatattgcactaggagtttttgctttagctggactaacagatttgttggatggatttattgctcgaaactgggccaatcaaagatcagctttgggaagtgctcttgatccacttgctgataaaatacttatcagtatcttatatgttagcttgacctatgcagatcttattccagttccacttacttacatgatcatttcgagagatgtaatgttgattgctgctgttttttatgtcagataccgaactcttccaacaccacgaacacttgccaagtatttcaatccttgctatgccactgctaggttaaaaccaacattcatcagcaaggtgaatacagcagtccagttaatcttggtggcagcttctttggcagctccagttttcaactatgctgacagcatttatcttcagatactatggtgttttacagctttcaccacagctgcatcagcttatagttactatcattatggccggaagactgttcaggtgataaaagactga

SEQ ID NO: 5682 - protein, 301 aa, Homo sapiens
MLALRVARGSWGALRGAAWAPGTRPSKRRACWALLPPVPCCLGCLAERWRLRPAALGLRLPGIGQRNHCSGAGKAAPRPAAGAGAAAEAPGGQWGPASTPSLYENPWTIPNMLSMTRIGLAPVLGYLIIEEDFNIALGVFALAGLTDLLDGFIARNWANQRSALGSALDPLADKILISILYVSLTYADLIPVPLTYMIISRDVMLIAAVFYVRYRTLPTPRTLAKYFNPCYATARLKPTFISKVNTAVQLILVAASLAAPVFNYADSIYLQILWCFTAFTTAASAYSYYHYGRKTVQVIKD

SEQ ID NO: 5683 - DNA, 1110 bp, Homo sapiens
gcctggctccgtttcctgcttttggttcttacagtagtcggcgtaggccttaggtgggttcgtgcgccttctacctcgctgtttcggttttcctggctcctcggcccttttctcccctgttgcagctgggagcggacgaagcgcgaagctgggattttttactgtctcctgaagaatttaacacaaacatggatatcagaccaaatcatacaatttatatcaacaatatgaatgacaaaattaaaaaggaagaattgaagagatccctatatgccctgttttctcagtttggtcatgtggtggacattgtggctttaaagaccatgaagatgagggggcaggcctttgtcatatttaaggaactgggctcatccacaaatgccttgagacagctacaaggatttccattttatggtaaaccaatgcgaatacagtatgcaaaaacagattcggatataatatcaaaaatgcgtggaacttttgctgacaaagaaaagaaaaaagaaaagaaaaaagccaaaactgtggaacagactgcaacaaccacaaacaaaaagcctggccagggaactccaaattcagctaatacccaaggaaattcaacaccaaatcctcaggtccctgattaccctccaaactatattttattccttaataacttaccagaagagactaatgagatgatgttatccatgctgtttaatcagttccctggcttcaaggaagtacgtctggtaccagggaggcatgacattgcttttgttgaatttgaaaatgatgggcaggctggagctgccagggatgctttacagggatttaagatcacaccgtcccatgctatgaagatcacctatgccaagaaataacatttgggatagtcgtctttaaaagacttggtgttatttacagtgtttgttttgataacatttggctgggtcattttaatagttagagatgaggaggagtaaaagtgaaatttttgtgaaggacttaaattatccagtgtttctttagccttggtgaactatgaaatacgaaggccttaattttgtacaataaacttttatttgtattctgtgcaaaaaaaaaaaaaaaaaaaaaaaaaaaaaa

SEQ ID NO: 5684 - protein, 225 aa, Homo sapiens
MDIRPNHTIYINNMNDKIKKEELKRSLYALFSQFGHVVDIVALKTMKMRGQAFVIFKELGSSTNALRQLQGFPFYGKPMRIQYAKTDSDIISKMRGTFADKEKKKEKKKAKTVEQTATTTNKKPGQGTPNSANTQGNSTPNPQVPDYPPNYILFLNNLPEETNEMMLSMLFNQFPGFKEVRLVPGRHDIAFVEFENDGQAGAARDALQGFKITPSHAMKITYAKK

SEQ ID NO: 5685 - DNA, 2056 bp, Homo sapiens
gagaggcgcccaggcggcggcggcggcggcccagcttcttctttcctcgcacagccaggcggcccctgctcgagtcccgcgtcgccatggccgcggttcccgagttgctgcagcagcaggaggaggaccgcagcaagctgagatctgtatctgtggacctgaatgttgatccctcgcttcagattgacatacctgatgcgctcagtgagagagacaaagtcaaatttacagtgcacacaaagaccacactgcccacgtttcagagcccagagttttctgttacaaggcaacatgaagactttgtgtggctacatgacactcttattgaaacaacagactatgctgggcttattattccacctgctcctacgaagcccgactttgatggtcctcgagagaagatgcagaaactgggagaaggtgaagggtctatgaccaaagaagaatttgccaagatgaaacaagaactggaagctgagtatctcgctgtgtttaagaagactgtgtcctcccatgaagtctttcttcagcggctttcttctcaccctgttctcagtaaagatcgcaactttcatgttttcctggaatatgatcaggatctaagtgttaggcggaaaaatactaaagagatgtttggtggcttcttcaaaagtgtggtgaaaagtgctgatgaagtcctttttactggagttaaggaggtagatgacttctttgagcaagagaagaacttccttattaactattacaataggatcaaagattcttgtgtgaaagctgacaaaatgaccagatctcataaaaatgttgccgatgactatatccacaccgcagcctgcttacatagcctggctttagaagagcccacagtcatcaaaaagtacctattgaaggttgctgagctatttgaaaaactaaggaaagtagagggtcgagtttcatcagatgaagatttgaagctaacagagctcctccgatactacatgctcaacattgaagctgctaaggatctcttatacagacgcaccaaagccctcattgactatgagaactcaaacaaagctctggataaggcccggttaaagagcaaagacgtcaagttggctgaggcacaccagcaggagtgctgccagaaatttgaacaactttccgaatctgcaaaagaagaactgataaatttcaaacggaagagagtggcagcatttagaaagaatctaattgaaatgtctgaactggaaataaaacatgccaggaacaatgtctcccttttgcagagctgtattgacttgttcaagaataactgatatgccttcactcagaagaaaagaaatgaatgtgaaagaaagccaagcatcacttgcacttaaatcattaccacggaagatatattagcttcaactttagtttaaaattatgtgaataaatattttgatttctacaaatcttaacatttaaccatgttggtttaaaaatattattgcttgctacttggacataactaatttttccttgtgcatttaatacctctgggcagaatccaaatactgggttctcccgtagttcgtctttagttactaagaaagggtgtaggacacattagccttctggaaacaagtagaagccatcacctggcccatgtccctacaaacccatgattgtcagggaggtgccagttacagcaggtgattcagctacttgaggtcggtaacagaccttccattcctcactgaaggtggggtttgtgtttttgttttgccctgttactccactggtagtcatctggtgtttgtactataacaacagcaagaaaatctcatttatctttatatactctttgcacctcctttttttagtcgagatataaatatttgaggggagagaaatatctacaggtatatatggaaacaaataatgtggtctgctttataagatggccagatctacattaggaaaagtataagccccctccctaatggccgctggggggtgagggcggtgtgttgtatgtctttgggtgtttgtttttttataaagcatataataaaataatcgtgctact

SEQ ID NO: 5686 - protein, 404 aa, Homo sapiens
MAAVPELLQQQEEDRSKLRSVSVDLNVDPSLQIDIPDALSERDKVKFTVHTKTTLPTFQSPEFSVTRQHEDFVWLHDTLIETTDYAGLIIPPAPTKPDFDGPREKMQKLGEGEGSMTKEEFAKMKQELEAEYLAVFKKTVSSHEVFLQRLSSHPVLSKDRNFHVFLEYDQDLSVRRKNTKEMFGGFFKSVVKSADEVLFTGVKEVDDFFEQEKNFLINYYNRIKDSCVKADKMTRSHKNVADDYIHTAACLHSLALEEPTVIKKYLLKVAELFEKLRKVEGRVSSDEDLKLTELLRYYMLNIEAAKDLLYRRTKALIDYENSNKALDKARLKSKDVKLAEAHQQECCQKFEQLSESAKEELINFKRKRVAAFRKNLIEMSELEIKHARNNVSLLQSCIDLFKNN

SEQ ID NO: 5687 - DNA, 1080 bp, Homo sapiens
gagagtgtccgttgcttcccgtccgtgtcgcggccctgcggttggcggcctcctcgtggagcggagcaagggtaggccccacgtggcgtctttgcccggctccaagatggacggcagcggggactgggaggctgctctgggggagcacgtggcgccctgctcgcctgctcccggggcagctgggatggtggcggagtccggaggcctcctgccgccgtcgggcagggaggccggcggaggcggggccgtggccgcccccgagaggcgcccaggcggcggcggcggcggcccagcttcttctttcctcgcacagccaggcggcccctgctcgagtcccgcgtcgccatggccgcggttcccgagttgctgcagcagcaggaggaggaccgcagcaaggtgaggtcctcccagcctcagactcctgggcgggcggccctgcgagctccggggtcgctgcattctttcccttgcgcgtccataggccgtggctgctcgccgccatccccagcgcgggaagcacccgtgagacccgggcggcccctctccctggtcttcactgaaggctgccccggggaatccctgtggatgtcccggattctattaggacagaaccagagacgcgggaccttagccccagctcaggcgccggtgccgagcggacttggagagatgatctctggagaccccggaatgttctttttaaaactttcctcggcttcgtggtgaccagtaggtgaacgtgaaattgacttaacatgcgacagaccagtttggtttgttgcccccaaaataccctccttccccccaccttttactgagaagacttttttggggggggggcccaaacaacttgggaaattgcatcaagcgtccgaacatgctgcttacaactttagaaacgcaaaatgcgttgttgtgggagttgtgtaatttttagtaggtgctcaaatacttgctgaacttggtgtctatttttaagtcttgcccattgatgtaaactgtccctaggtcacgtgtatcttgaggtctaaaagattatttatgcaataaattgaaattcccatagccaattaaagattc

SEQ ID NO: 5688 - DNA, 602 bp, Homo sapiens
ctttctctagacgcgtcttgctgggagagtgtccgttgcttcccgtccgtgtcgcggccctgcggttggcggcctcctcgtggagcggagcaagggtaggccccacgtggcgtctttgcccggctccaagatggacggcagcggggactgggaggctgctctgggggagcacgtggcgccctgctcgcctgctcccggggcagctgggatggtggcggagtccggaggcctcctgccgccgtcgggcagggaggccggcggaggcggggccgtggccgcccccgagaggcgcccaggcggcggcggcggcggcccagcttcttctttcctcgcacagccaggcggcccctgctcgagtcccgcgtcgccatggccgcggttcccgagttgctgcagcagcaggaggaggaccgcagcaaggccgtggctgctcgccgccatccccagcgcgggaagcacccgtgagacccgggcggcccctctccctggtcttcactgaaggctgccccggggaatccctgtggatgtcccggattctattaggacagaaccagagacgcgggaccttagccccagctcaggcgccggtgccgagcggactt

SEQ ID NO: 5689 - DNA, 3911 bp, Homo sapiens
gaggggtcgagcctgggcagtacaggcggcggtgcgcactctgcggcggcctctgcgcctcgggcgggcgggagagagaggccgcggccgccagcgtggggatgtctaggagctcgaaggtggtgctgggcctctcggtgctgctgacggcggccacagtggccggcgtacatgtgaagcagcagtgggaccagcagaggcttcgtgacggagttatcagagacattgagaggcaaattcggaaaaaagaaaacattcgtcttttgggagaacagattattttgactgagcaacttgaagcagaaagagagaagatgttattggcaaaaggatctcaaaaatcatgacttgaatgtgaaatatctgttggacagacaacacgagtttgtgtgtgtgtgttgatggagagtagcttagtagtatcttcatctttttttttggtcactgtccttttaaacttgatcaaataaaggacagtgggtcatataagttactgctttcagggtcccttatatctgaataaaggagtgtgggcagacactttttggaagagtctgtctgggtgatcctggtagaagccccattagggtcactgtccagtgcttagggttgttactgagaagcactgccgagcttgtgagaaggaagggatggatagtagcatccacctgagtagtctgatcagtcggcatgatgacgaagccacgagaacatcgacctcagaaggactggaggaaggtgaagtggagggagagacgctcctgatcgtcgaatccgaggatcaggcatcagtggacttatcgcacgaccagagtggggattccctcaacagtgatgaaggagacgtgtcttggatggaggagcagctgtcctacttctgtgacaagtgccaaaaatggataccagccagtcagctgagggaacagctcagttaccttaagggtgataatttttttaggtttacttgttcggattgctcagcagatggcaaggagcagtatgaaaggctgaagctgacatggcagcaagtcgtcatgttggcaatgtacaacttgtctctggaaggaagtggacgtcaaggttatttcaggtggaaagaagatatctgtgcttttattgagaaacattggacttttttactagggaataggaaaaagacgtctacctggtggagcaccgtggcaggttgcctcagcgtgggaagtcccatgtacttccgttcaggtgctcaggaatttggagagccaggatggtggaaacttgttcataacaagcccccaacgatgaaacctgaaggagagaagttgtctgcctctactttgaaaataaaagcagcctcaaaaccaactttagatcccatcattactgttgagggacttagaaaacgagcaagtcggaatcctgtggaatctgccatggaattaaaagagaaaaggtctcgaactcaggaagcaaaagacattagaagagcccagaaggaggccgctggctttcttgacaggagcacatcttctacccctgtaaaattcataagccgaggccgcaggccagatgtgattctggaaaaaggcgaagtgattgacttttcctccttgagctcctctgaccgcaccccgctgacaagcccatctccttctccttctctggatttctctgcccctggtacacctgcctctcattctgccacacctagcttgctttcagaagcagatctgattccagatgtgatgcccccacaagccttgtttcatgatgacgatgagatggaaggcgatggagtcatagacccagggatggagtacgtcccaccccctgctgggtcagtagcttctgggccagtggttggggtcagaaagaaggtcagaggccctgaacagataaagcaggaggtagagagtgaggaggaaaaacccgacaggatggatattgacagtgaagacacagattcaaacacatctttgcaaacaagggctagagaaaagaggaagcctcagctggagaaggacacaaagccgaaagagcccaggtatactcccgtgagcatctacgaggaaaagctgctgctcaagaggctggaagcttgtcccggtgctgttgccatgactccggaagctcggagactgaaacgcaaactgattgtcagacaagcgaaaagggataggggattaccactttttgacttggatcaagttgttaatgctgctcttttgttagttgacgggatttatggagccaaagaaggaggaatttccagacttccagctggacaagccacgtacagaaccacctgtcaggacttcagaatccttgaccgataccagacttccttgccgtccaggaagggatttcgacaccagaccaccaagtttttgtatcgcttggtaggatcagaagatatggctgtggaccagagtattgtcagcccttatacctctcggatcttgaaaccttatatcaggcgtgattatgaaacaaagccacccaaactgcagctcctgtcacagattcgttcccacctgcacaggagcgaccctcactggacgccggagcccgacgcacctctcgattactgttatgtgcggccaaatcacatcccaacgatcaactccatgtgtcaggagtttttttggcctggcattgacctgtctgagtgtctgcagtacccagacttcagtgttgttgttctttataaaaaagtcatcattgcctttggcttcatggttcctgatgtgaaatacaatgaagcttacatttcatttctgttcgtccaccctgaatggagaagagcagggattgcaactttcatgatctatcatctgattcagacctgcatgggcaaggacgtaacccttcacgtctcagcaagcaaccctgctatgctactgtaccagaagtttggattcaagactgaagaatatgtattagatttctatgataaatattacccattggagagtacagagtgtaaacacgcattctttctgaggctccggcgctgatgcgaatacagctcacagagaaacgcatgtgctattggagaacaggtctttgtggagatctaaaggcagtgattgatttcacagggagctctaatctctgtgattacatggtccttcaaactcccaaccaaagtgagaaaagcggcatgcagtgaaatgagcagtgagcagccctttagcaaaatcgccctccagtccttcctggagatgccttcagccagcatcccagactccacagttatttatgaatgatgtcgtgattctccctccacctgacagtttgtaagagtgaaagagcatctaacctgatgctcttggagagagataacctgtctgtcataacttaaaggatgagaaaatgtggtgtagctattaaagattcatgcagtcccaaaaggcactgtcctgggatgatgagagattataaggtgatttcataaaaggaatccaaccctgtgcccggccattgatgtgttgtcattgaatccaggaggatttctagggcactgaagttttgttgtttcttttgctgactttggttacagtcagaaaaaataaactagatgtttgtgtctacatgttctacctgttgtacctattagcatcttcctgcagggacttgggcccatggcctgggaggttggtttgggattggggttgttgggcagcctgccattcacctggcctatcctggcccttctcatgcccaagacagttgtttcacaggagtggaagtgtgggtgatgcaagtagaaccctctagatgtaccctgtgtggtctgcaggactggactgtttgctgtgtttgtggatgttggcgatagactgtcaattaggttgtttgtgatccaacaagaacatttccaaaagtatctaggtgttctcaaataaaaagctttctttgcacaaccc

SEQ ID NO: 5690 - protein, 782 aa, Homo sapiens
MDSSIHLSSLISRHDDEATRTSTSEGLEEGEVEGETLLIVESEDQASVDLSHDQSGDSLNSDEGDVSWMEEQLSYFCDKCQKWIPASQLREQLSYLKGDNFFRFTCSDCSADGKEQYERLKLTWQQVVMLAMYNLSLEGSGRQGYFRWKEDICAFIEKHWTFLLGNRKKTSTWWSTVAGCLSVGSPMYFRSGAQEFGEPGWWKLVHNKPPTMKPEGEKLSASTLKIKAASKPTLDPIITVEGLRKRASRNPVESAMELKEKRSRTQEAKDIRRAQKEAAGFLDRSTSSTPVKFISRGRRPDVILEKGEVIDFSSLSSSDRTPLTSPSPSPSLDFSAPGTPASHSATPSLLSEADLIPDVMPPQALFHDDDEMEGDGVIDPGMEYVPPPAGSVASGPVVGVRKKVRGPEQIKQEVESEEEKPDRMDIDSEDTDSNTSLQTRAREKRKPQLEKDTKPKEPRYTPVSIYEEKLLLKRLEACPGAVAMTPEARRLKRKLIVRQAKRDRGLPLFDLDQVVNAALLLVDGIYGAKEGGISRLPAGQATYRTTCQDFRILDRYQTSLPSRKGFRHQTTKFLYRLVGSEDMAVDQSIVSPYTSRILKPYIRRDYETKPPKLQLLSQIRSHLHRSDPHWTPEPDAPLDYCYVRPNHIPTINSMCQEFFWPGIDLSECLQYPDFSVVVLYKKVIIAFGFMVPDVKYNEAYISFLFVHPEWRRAGIATFMIYHLIQTCMGKDVTLHVSASNPAMLLYQKFGFKTEEYVLDFYDKYYPLESTECKHAFFLRLRR

SEQ ID NO: 5691 - DNA, 405 bp, Homo sapiens
atgatgaacacaaacggaaagaggagaggcacccgatatatgttctctaggacttttagaaaacatggagttgttcctttggtcacgtatatgcgaatctataagaaaggtgatattgtagacatcaagggaatgggtactgttcaaaaaggaatgccccacaagtgttaccatggcaaaactggaagagtctacagtgttacccagcatgctgttggcattgttagcattaatgtgcatactgagcacatgaagcactctaagagccgagatagcttcctgaaatgcatgaggaaaatgatcagaaaaaaaaaagaagccaaagagaaagaagcacactttgtgagaaccaatgggaaggagcctgagctgctggaacttattccgtatgaattcatggcataa

SEQ ID NO: 5692 - protein, 134 aa, Homo sapiens
MMNTNGKRRGTRYMFSRTFRKHGVVPLVTYMRIYKKGDIVDIKGMGTVQKGMPHKCYHGKTGRVYSVTQHAVGIVSINVHTEHMKHSKSRDSFLKCMRKMIRKKKEAKEKEAHFVRTNGKEPELLELIPYEFMA

SEQ ID NO: 5693 - DNA, 2396 bp, Homo sapiens
tgggcgcgccttccgggtgtcacctccagagggcgccggctgcggagcctccctcagagtcgcgaggccggacgcatcgcggcgccgccccactcgccccagccgccgccatgaaggccgtggtgcagcgcgtcacccgggccagcgtcacagttggaggagagcagattagtgccattggaaggggcatatgtgtgttgctgggtatttccctggaggatacgcagaaggaactggaacacatggtccgaaagattctaaacctgcgtgtatttgaggatgagagtgggaagcactggtcgaagagtgtgatggacaaacagtacgagattctgtgtgtcagccagtttaccctccagtgtgtcctgaagggaaacaagcctgatttccacctagcaatgcccacggagcaggcagagggcttctacaacagcttcctggagcagctgcgtaaaacatacaggccggagcttatcaaagatggcaagtttggggcctacatgcaggtgcacattcagaatgatgggcctgtgaccatagagctggaatcgccagctcccggcactgctacctctgacccaaagcagacggattctcgctctgtctcccaggctggagtgcagtggcgcgatctccgttcattgcaagctccacctcccgggttcatgccattcttctgcctaagcctcccaagtagctgggactataggcacgtgccaccatgcccggctaatttttttgtatttttttagtagagacggggttttaccatgttagccaggatggtctcgatctcctgccctggtgatccacccgcctcggcctcccaaagtgctgggattacaggtgtgaactaccgcgcccagccaaagttcactaggttttttaaatgtcttttttctgctccgggataatgcaggattccacacggcatttagttgtcatttctgcttagtcttctccaatctgtgacagttcctcagcctttccttgtcttttgtgacattgatacttttcaagagtactagtctactgttttgtagaatgtttctcactttgggttttctatgattatattgaggtaatacatgttgacaggaataggaaatagcacagaagtgatcttgtgcccttcatagtgcatcctaccaggaggtatgtggtattgatttgtcttgttacctgtgataccagccttattacttggttcaggtgaagtctaccagatacctccatgttagatgaagtgctaacctctttccccttgtctgtcctctggctcattcacagcagacagctctctctcagctttgcagggaaagaagccagcagatggcattgactctgcttctctatcccccttctgccaccgtggtagcagagctaccctttcctgggctgagtccagcctctccctggggccaggaccagctacataatttgagaggcccagtgtaaaatgaaaatgtggggccccttgttcaaaaaatattacaaatttcaaggtggtgacatagagcataaaacgaaaggtggggcccctctgaaggtggggcctgtgtgactgctcggctgtgggtctagactgacctgggctttggagcccttcccttccacctcctcagcagcttcctggaagcctctgtcctcttgttggttctgtctgcctctcacagtcatccatcttatcccattgggttttaaatatgcccaaatgtctccaattgagaaatgcttccatttcctcccttctgctctgccacagtgtccttgggtctgtaaaggttctcaccgagggccccagtgacctcacattgctttatttcatgcccatttttcagaacacttttcttgccactgctgcccacttttgcccctggaaatggctggagccttgtttcccaggacgtcattctctctgggtttttgtcttgcctctggctactccctctggttttatttgatcattattccatagtttttagttattattctgctttaactctatttggagaaaaattttagtctttttttcattctaaatatttttccggaaatggtagaatagtacattttgcctttagaatcttcacctttctttcaaccagtaccctcttcttgtttaggtcaaagggtacaaagatgcagttattttgggtgagtaagtctcaagatctaatgtacaccataaggagtgcagtatcatattgtgcactgggagtagatttaggaattctcagcacacacagaataaaggacggtaactgtgtgagatgctggacatgtaatttacttgactgtagtaatcacttcactatgtgtatgtagatcagagcatcatgctgtacaccttatacaataaatccctctccccaaatcaaaaaaaaaaaaaaaaa

SEQ ID NO: 5694 - protein, 213 aa, Homo sapiens
MKAVVQRVTRASVTVGGEQISAIGRGICVLLGISLEDTQKELEHMVRKILNLRVFEDESGKHWSKSVMDKQYEILCVSQFTLQCVLKGNKPDFHLAMPTEQAEGFYNSFLEQLRKTYRPELIKDGKFGAYMQVHIQNDGPVTIELESPAPGTATSDPKQTDSRSVSQAGVQWRDLRSLQAPPPGFMPFFCLSLPSSWDYRHVPPCPANFFVFF

SEQ ID NO: 5695 - DNA, 625 bp, Homo sapiens
ctctcggctttcggctcggaggaggccaaggtgcaactttcttcggtcgtcctgaatccgggttcatccgacaccagctgcctccaccatgctgccgaagttcgacccgaacgagatcaaagtcgtatacctgaggtgcaccggaggtgaagtcggtgccacttctgccctggcccccaagatcggccccctgggtctgtctccaaaaaaggttggtgatgacattgccaaggcaatgggtgactggaagggcctgaggattacagtgaaactaaccattcagaacagacaggcccagattgaggtggtgccttctgcctctgccatgatcatcaaagccctcaaggaaccaccaagagacagaaagaaacagaaaaacattaaacacagtgggaatatcacttttgatgagatcgtcaacattgctcgacagatgcggcaccaatccttagccagagaactctctggaaccactaaagagatcctggggactgcccagtctgtgggctgtaatgttgatggccgccaccctcatgacatcatagatgacatcaacagtggtgctgtagaatgcccagctagttaagcacaaaggaaaatatttcaataaaggatcatttgacaa

SEQ ID NO: 5696 - DNA, 306 bp, Homo sapiens
atgaaagtcgagctgtgcagtttcagcggatacaagatctactccggacacaggaggcgctacgccaggaccgaagggaaggttttccggtttcttaattcaaaatgcgaagggatcagaaacctgaagttagaaaggctcaaagagaacaagctatcagggctgctaaggaagcaaaaaaaggctaagcaagcatctaaaaagactgcaatggctgctgctaaggcacctacaaaggcagcacctaagcaaaagactgtgaaggttgtgaaagtttcagctccccaagttggtggaaaacgctaa

SEQ ID NO: 5697 - protein, 101 aa, Homo sapiens
MKVELCSFSGYKIYSGHRRRYARTEGKVFRFLNSKCEGIRNLKLERLKENKLSGLLRKQKKAKQASKKTAMAAAKAPTKAAPKQKTVKVVKVSAPQVGGKR

SEQ ID NO: 5698 - DNA, 3445 bp, Homo sapiens
aagtgctggtgccctctgccgctgctcccgtctctttggttacgctcgtcagccggtcggccgccgcctccagccgtgtgccgctatgggagtcccggcgttcttccgctggctcagccgcaagtacccgtccatcatagtcaactgcgtggaagagaagccaaaagaatgcaatggtgtaaagattccagttgatgccagtaaacctaatccaaatgatgtggagtttgataatctgtatttggatatgaatggaatcatccatccctgtactcatcctgaagacaaaccagcaccaaaaaatgaagatgaaatgatggttgcaatttttgagtacattgacagacttttcagtattgtaagaccaagaagacttctctacatggcaatagatggagtggcaccacgtgctaaaatgaaccagcagcgttcaaggaggttcagggcatcaaaagaaggaatggaagcagcagtcgagaagcagcgagtcagggaagaaatattggcaaaaggtggctttcttcctccagaagaaataaaagaaagatttgacagcaactgtattacaccaggaactgaattcatggacaatcttgctaaatgccttcgctattacatagctgatcgtttaaataatgaccctgggtggaaaaatttgacagttattttatctgatgctagtgctcctggtgaaggagaacataaaatcatggattacattagaaggcaaagagcccagcctaaccatgacccaaatactcatcattgtttatgtggagcagatgctgatctcattatgcttggccttgccacacatgaaccgaactttaccattattagagaagaattcaaaccaaacaagcccaaaccatgtggtctttgtaatcagtttggacatgaggtcaaagattgtgaaggtttgccaagagaaaagaagggaaagcatgatgaacttgccgatagtcttccttgtgcagaaggagagtttatcttccttcggcttaatgttcttcgtgagtatttggaaagagaactcacaatggccagcctaccattcacatttgatgttgagaggagcattgatgactgggttttcatgtgcttctttgtgggaaatgacttcctccctcatttgccatcgttagagattagggaaaatgcaattgaccgtttggttaacatatacaaaaatgtggtacacaaaactgggggttaccttacagaaagtggttatgtcaatctgcaaagagtacagatgatcatgttagcagttggtgaagttgaggatagcatttttaaaaagagaaaggatgatgaggacagttttagaagacgacagaaagaaaaaagaaagagaatgaagagagatcaaccagctttcactcctagtggaatattaactcctcatgccttgggttcaagaaattcaccaggttctcaagtagccagtaatccgagacaagcagcctatgaaatgaggatgcagaataactctagtccttcgatatctcctaatacgagtttcacatctgatggctccccgtctccattaggaggaattaagcgaaaagcagaagacagtgacagtgaacctgagccagaggataatgtcaggttatgggaagctggctggaagcagcggtactacaagaacaaatttgatgtggatgcagctgatgagaaattccgtcggaaagttgtgcagtcgtacgttgaaggactttgctgggttcttagatattattaccagggctgtgcttcctggaagtggtattatccatttcattatgcaccatttgcttcagactttgaaggcattgcagacatgccatctgattttgagaagggtacgaaaccgtttaaaccactagaacaacttatgggggtatttccagctgcaagtggtaattttctacctccatcatggcggaagctcatgagtgatcctgattctagtataattgacttctatcctgaagattttgctattgatttgaatgggaagaaatatgcatggcaaggtgttgctctcttgccattcgtggatgagcgaaggctacgagctgccctagaagaggtatacccagacctcactccagaagagaccagaagaaacagccttggaggtgatgtcttatttgtggggaaacatcacccactccatgacttcattttagagctgtaccagacaggttccacagagccagtggaggtaccccctgaactatgtcatgggattcaaggaaagttttctttggatgaagaagccattcttccagatcaaatagtatgttctcctgttcctatgttaagggatctgacacagaacactgtagtcagtattaattttaaagacccacagtttgctgaagattacatttttaaagctgtaatgcttccaggagcaagaaagccagcagcagtactgaaacctagtgactgggaaaaatccagcaatggacggcagtggaagcctcagcttggctttaaccgtgaccggaggcctgtgcacctggatcaggcagccttcaggactttgggccatgtgatgccaagaggctcaggaactggcatttacagcaatgctgcaccaccacctgtgacttaccagggaaacttatacaggccgcttttgagaggacaagcccagattccaaaacttatgtcaaatatgaggccccaggattcctggcgaggtcctcctccccttttccagcagcaaaggtttgacagaggcgttggggctgaacctctgctcccatggaaccggatgctgcaaacccagaatgcagccttccagccaaaccagtaccagatgctagctgggcctggtgggtatccacccagacgagatgatcgtggagggagacagggatatcccagagaaggaaggaaataccctttgccaccaccctcaggaagatacaattggaattaagcttttgtaaagctttcccaaatcctttcatcattctacagttttatgctatttgtggaaagatttctttctcaagtagtagtttttaataaaactacagtactttgtgtatttcttttaactgtgtatatttctactgatctgatctcactgtttatgttgctttccaaagatgtatgttgcataatacagtggatctgaatttattattgcttataaaacacatttgatggaataggagtactggtttttcataatggttaaaaatgaaaccagctgtggatttcaaaacacagtgtattctagatcatctaagatccatgctgatttttattgcacaagaattaggtttgaactcttgagctggaacctcagcaaactagagtatatattgttcagtatttctttggaaacatttcattaatgtacttgtcttacagaaatttctgaactttagtaaaaaaaaataaagttaaacttttaaaactcaaaaaaaaaaaaaaaaaa

SEQ ID NO: 5699 - protein, 950 aa, Homo sapiens
MGVPAFFRWLSRKYPSIIVNCVEEKPKECNGVKIPVDASKPNPNDVEFDNLYLDMNGIIHPCTHPEDKPAPKNEDEMMVAIFEYIDRLFSIVRPRRLLYMAIDGVAPRAKMNQQRSRRFRASKEGMEAAVEKQRVREEILAKGGFLPPEEIKERFDSNCITPGTEFMDNLAKCLRYYIADRLNNDPGWKNLTVILSDASAPGEGEHKIMDYIRRQRAQPNHDPNTHHCLCGADADLIMLGLATHEPNFTIIREEFKPNKPKPCGLCNQFGHEVKDCEGLPREKKGKHDELADSLPCAEGEFIFLRLNVLREYLERELTMASLPFTFDVERSIDDWVFMCFFVGNDFLPHLPSLEIRENAIDRLVNIYKNVVHKTGGYLTESGYVNLQRVQMIMLAVGEVEDSIFKKRKDDEDSFRRRQKEKRKRMKRDQPAFTPSGILTPHALGSRNSPGSQVASNPRQAAYEMRMQNNSSPSISPNTSFTSDGSPSPLGGIKRKAEDSDSEPEPEDNVRLWEAGWKQRYYKNKFDVDAADEKFRRKVVQSYVEGLCWVLRYYYQGCASWKWYYPFHYAPFASDFEGIADMPSDFEKGTKPFKPLEQLMGVFPAASGNFLPPSWRKLMSDPDSSIIDFYPEDFAIDLNGKKYAWQGVALLPFVDERRLRAALEEVYPDLTPEETRRNSLGGDVLFVGKHHPLHDFILELYQTGSTEPVEVPPELCHGIQGKFSLDEEAILPDQIVCSPVPMLRDLTQNTVVSINFKDPQFAEDYIFKAVMLPGARKPAAVLKPSDWEKSSNGRQWKPQLGFNRDRRPVHLDQAAFRTLGHVMPRGSGTGIYSNAAPPPVTYQGNLYRPLLRGQAQIPKLMSNMRPQDSWRGPPPLFQQQRFDRGVGAEPLLPWNRMLQTQNAAFQPNQYQMLAGPGGYPPRRDDRGGRQGYPREGRKYPLPPPSGRYNWN

SEQ ID NO: 5700 - DNA, 2078 bp, Homo sapiens
cccgcccacttccaactaccgcctccggcctgcccagggagagagagggagtggagcccagggagagggagcgcgagagagggagggaggaggggacggtgctttggctgacttttttttaaaagagggtgggggtggggggtgattgctggtcgtttgttgtggctgttaaattttaaactgccatgcactcggcttccagtatgctgggagcggtgaagatggaagggcacgagccgtccgactggagcagctactatgcagagcccgagggctactcctccgtgagcaacatgaacgccggcctggggatgaacggcatgaacacgtacatgagcatgtcggcggccgccatgggcagcggctcgggcaacatgagcgcgggctccatgaacatgtcgtcgtacgtgggcgctggcatgagcccgtccctggcggggatgtcccccggcgcgggcgccatggcgggcatgggcggctcggccggggcggccggcgtggcgggcatggggccgcacttgagtcccagcctgagcccgctcggggggcaggcggccggggccatgggcggcctggccccctacgccaacatgaactccatgagccccatgtacgggcaggcgggcctgagccgcgcccgcgaccccaagacctacaggcgcagctacacgcacgcaaagccgccctactcgtacatctcgctcatcaccatggccatccagcagagccccaacaagatgctgacgctgagcgagatctaccagtggatcatggacctcttccccttctaccggcagaaccagcagcgctggcagaactccatccgccactcgctctccttcaacgactgtttcctgaaggtgccccgctcgcccgacaagcccggcaagggctccttctggaccctgcaccctgactcgggcaacatgttcgagaacggctgctacctgcgccgccagaagcgcttcaagtgcgagaagcagctggcgctgaaggaggccgcaggcgccgccggcagcggcaagaaggcggccgccggagcccaggcctcacaggctcaactcggggaggccgccgggccggcctccgagactccggcgggcaccgagtcgcctcactcgagcgcctccccgtgccaggagcacaagcgagggggcctgggagagctgaaggggacgccggctgcggcgctgagccccccagagccggcgccctctcccgggcagcagcagcaggccgcggcccacctgctgggcccgccccaccacccgggcctgccgcctgaggcccacctgaagccggaacaccactacgccttcaaccacccgttctccatcaacaacctcatgtcctcggagcagcagcaccaccacagccaccaccaccaccaaccccacaaaatggacctcaaggcctacgaacaggtgatgcactaccccggctacggttcccccatgcctggcagcttggccatgggcccggtcacgaacaaaacgggcctggacgcctcgcccctggccgcagatacctcctactaccagggggtgtactcccggcccattatgaactcctcttaagaagacgacggcttcaggcccggctaactctggcaccccggatcgaggacaagtgagagagcaagtgggggtcgagactttggggagacggtgttgcagagacgcaagggagaagaaatccataacacccccaccccaacacccccaagacagcagtcttcttcacccgctgcagccgttccgtcccaaacagagggccacacagataccccacgttctatataaggaggaaaacgggaaagaatataaagttaaaaaaaagcctccggtttccactactgtgtagactcctgcttcttcaagcacctgcagattctgatttttttgttgttgttgttctcctccattgctgttgttgcagggaagtcttacttaaaaaaaaaaaaaaattttgtgagtgactcggtgtaaaaccatgtagttttaacagaaccagagggttgtactattgtttaaaaacaggaaaaaaaataatgtaagggtctgttgtaaatgaccaag

SEQ ID NO: 5701 - DNA, 2410 bp, Homo sapiens
tcgcgttctgggccccggagtccgagacaggcggggaccccggcagctcccggtgctatctctgagcgggttccgagccccacttccgggcggtcagaattagcctcagagcgccgagcaacgacgcgccggggacctcccgcccatgaggccggaaggggcggggagaacgctgcggaatggtccctgggcgcaacgtcatttccgcgtacgggggagggcgggcctggagtctgagccggcgccgctcagtgtgaggtggtttctgcgggtgaggctggcgcccgtaccatgagcgaggcggacgggctgcgacagcgccggcccctgcggccgcaggtcgtcacagacgatgatggccaggccccggaggctaaggacggcagctcctttagcggcagagttttccgagtgaccttcttgatgctggctgtttctctcaccgttcccctgcttggagccatgatgctgctggaatctcctatagatccacagcctctcagcttcaaagaacccccgctcttgcttggtgttctgcatccaaatacgaagctgcgacaggcagaaaggctgtttgaaaatcaacttgttggaccggagtccatagcacatattggggatgtgatgtttactgggacagcagatggccgggtcgtaaaacttgaaaatggtgaaatagagaccattgcccggtttggttcgggcccttgcaaaacccgagatgatgagcctgtgtgtgggagacccctgggtatccgtgcagggcccaatgggactctctttgtggccgatgcatacaagggactatttgaagtaaatccctggaaacgtgaagtgaaactgctgctgtcctccgagacacccattgaggggaagaacatgtcctttgtgaatgatcttacagtcactcaggatgggaggaagatttatttcaccgattctagcagcaaatggcaaagacgagactacctgcttctggtgatggagggcacagatgacgggcgcctgctggagtatgatactgtgaccagggaagtaaaagttttattggaccagctgcggttcccgaatggagtccagctgtctcctgcagaagactttgtcctggtggcagaaacaaccatggccaggatacgaagagtctacgtttctggcctgatgaagggcggggctgatctgtttgtggagaacatgcctggatttccagacaacatccggcccagcagctctggggggtactgggtgggcatgtcgaccatccgccctaaccctgggttttccatgctggatttcttatctgagagaccctggattaaaaggatgatttttaagctctttagtcaagagacggtgatgaagtttgtgccgcggtacagcctcgtcctagaactcagcgacagcggtgccttccggagaagcctgcatgatcccgatgggctggtggccacctacatcagcgaggtgcacgaacacgatgggcacctgtacctgggctctttcaggtcccccttcctctgcagactcagcctccaggctgtttagccctcccagatagctgcccctgccacgcaggccaggagtcttcacactcaggcaccaggcctggtccaggaggagctgtggacacagtcgtggttcaagtgtccacatgcacctgttagtccctgagaggtggtgggaatggctgcttcattcctcgaggatgcccgggccccacctgggcttgtctttctgtttagagggaagtgtaacatatctgccatgaggaacataaattcatgtaaagccattttctcttaaacaaaacaaaactttctaagtacagtcattctctaggatttgggaagctccttgcacttggaacagggctcaggtgggtggagcagtaaggcactacccagagagcttgctgctgcggccctgtcctgcggcctcaaagttcttctttactatatataacgtgcggtcatacctttcttcgttgtggtggggatggaagagcagagggagcatggcccaggggtgttgaggccagcggtgagagccgtgttagccaagacatggaactgtgttctcaagggttatgtggggcgtgggctctccatagtgtgtatgaaaagcttgttgactctagcggctcagagaggactttgctgggtttctttctgtgaatatctccgtgctgaccatgctggaattggatgattctgcaattcgggacctactgcaggggtccgtttagtaacgtcttgtctgtgatctttgttcttgacctctagaccccaagatgtgaacagtgcacgtgttaatgtcatctttgctcatgtgttataagccccaagttgctgtatattttcacaagtatgtctacacactggtcatgattttgataataaataacgataaatcg

SEQ ID NO: 5702 - protein, 416 aa, Homo sapiens
MSEADGLRQRRPLRPQVVTDDDGQAPEAKDGSSFSGRVFRVTFLMLAVSLTVPLLGAMMLLESPIDPQPLSFKEPPLLLGVLHPNTKLRQAERLFENQLVGPESIAHIGDVMFTGTADGRVVKLENGEIETIARFGSGPCKTRDDEPVCGRPLGIRAGPNGTLFVADAYKGLFEVNPWKREVKLLLSSETPIEGKNMSFVNDLTVTQDGRKIYFTDSSSKWQRRDYLLLVMEGTDDGRLLEYDTVTREVKVLLDQLRFPNGVQLSPAEDFVLVAETTMARIRRVYVSGLMKGGADLFVENMPGFPDNIRPSSSGGYWVGMSTIRPNPGFSMLDFLSERPWIKRMIFKLFSQETVMKFVPRYSLVLELSDSGAFRRSLHDPDGLVATYISEVHEHDGHLYLGSFRSPFLCRLSLQAV

SEQ ID NO: 5703 - DNA, 2762 bp, Homo sapiens
gtggggtcgtatcccgcgggtggaggccggggtggcgccggccggggcgggggagcccaaaagaccggctgccgcctgctccccggaaaagggcactcgtctccgtgggtgtggcggagcgcgcggtgcatggaatgggctatgtgaatgaaaaaaggtatccgttatgaaacttccagaaaaacgagctacatttttcagcagccgcagcacggtccttggcaaacaaggatgagaaaaatatccaaccacgggagcctgcgggtggcgaaggtggcataccccctggggctgtgtgtgggcgtgttcatctatgttgcctacatcaagtggcaccgggccaccgccacccaggccttcttcagcatcaccagggcagccccgggggcccggtggggtcagcaggcccacagccccctggggacagctgcagacgggcacgaggtcttctacgggatcatgtttgatgcaggaagcactggcacccgagtacacgtcttccagttcacccggccccccagagaaactcccacgttaacccacgaaaccttcaaagcagtgaagccaggtctttctgcctatgctgatgatgttgaaaagagcgctcagggaatccgggaactactggatgttgctaaacaggacattccgttcgacttctggaaggccacccctctggtcctcaaggccacagctggcttacgcctgttacctggagaaaaggcccagaagttactgcagaaggtgaaagaagtatttaaagcatcgcctttccttgtaggggatgactgtgtttccatcatgaacggaacagatgaaggcgtttcggcgtggatcaccatcaacttcctgacaggcagcttgaaaactccaggagggagcagcgtgggcatgctggacttgggcggaggatccactcagatcgccttcctgccacgcgtggagggcaccctgcaggcctccccacccggctacctgacggcactgcggatgtttaacaggacctacaagctctattcctacagctacctcgggctcgggctgatgtcggcacgcctggcgatcctgggcggcgtggaggggcagcctgctaaggatggaaaggagttggtcagcccttgcttgtctcccagtttcaaaggagagtgggaacacgcagaagtcacgtacagggtttcagggcagaaagcagcggcaagcctgcacgagctgtgtgctgccagagtgtcagaggtccttcaaaacagagtgcacaggacggaggaagtgaagcatgtggacttctatgctttctcctactattacgaccttgcagctggtgtgggcctcatagatgcggagaagggaggcagcctggtggtgggggacttcgagatcgcagccaagtacgtgtgtcggaccctggagacacagccgcagagcagccccttctcatgcatggacctcacctacgtcagcctgctactccaggagttcggctttcccaggagcaaagtgctgaagctcactcggaaaattgacaatgttgagaccagctgggctctgggggccatttttcattacatcgactccctgaacagacagaagagtccagcctcatagtggccgagccatccctgtccccgtcagcagtgtctgtgtgtctgcataaaccctcctgtcctggacgtgacttcatcctgaggagccacagcacaggccgtgctggcactttctgcacactggctctgggacttgcagaaggcctggtgctgccctggcatcagcctcttccagtcacatctggccagagggctgtctggacctgggccctgctcaatgccacctgtctgcctgggctccaagtgggcaggaccaggacagaaccacaggcacacactgagggggcagtgtggctccctgcctgtcccatccccatgccccgtccgcggggctgtggctgctgctgtgcatgtccctgcgatgggagtcttgtctcccagcctgtcagtttcctccccagggcagagctccccttcctgcaagagtctgggaggcggtgcaggctgtcctggctgctctggggaagccgagggacagccataacacccccgggacagtaggtctgggcggcaccactgggaactctggacttgagtgtgtttgctcttccttgggtatgaatgtgtgagttcacccagaggcctgctctcctcacacattgtgtggtttggggttaatgatggagggagacacctcttcatagacggcaggtgcccacctttcagggagtctcccagcatgggcggatgccgggcatgagctgctgtaaactatttgtggctgtgctgcttgagtgacgtctctgtcgtgtgggtgccaagtgcttgtgtagaaactgtgttctgagcccccttttctggacaccaactgtgtcctgtgaatgtatcgctactgtgagctgttcccgcctagccagggccatgtcttaggtgcagctgtgccacgggtcagctgagccacagtcccagaaccaagctctcggtgtctcgggccaccatccgcccacctcgggctgaccccacctcctccatggacagtgtgagccccgggccgtgcatcctgctcagtgtggcgtcagtgtcggggctgagccccttgagctgcttcagtgaatgtacagtgcccggcacgagctgaacctcatgtgttccactcccaataaaaggttgacaggggcttctccttcaaaaaaaaaaaaaaaaaaaaaaaaaaaaaaaaaa

SEQ ID NO: 5704 - protein, 484 aa, Homo sapiens
MKKGIRYETSRKTSYIFQQPQHGPWQTRMRKISNHGSLRVAKVAYPLGLCVGVFIYVAYIKWHRATATQAFFSITRAAPGARWGQQAHSPLGTAADGHEVFYGIMFDAGSTGTRVHVFQFTRPPRETPTLTHETFKAVKPGLSAYADDVEKSAQGIRELLDVAKQDIPFDFWKATPLVLKATAGLRLLPGEKAQKLLQKVKEVFKASPFLVGDDCVSIMNGTDEGVSAWITINFLTGSLKTPGGSSVGMLDLGGGSTQIAFLPRVEGTLQASPPGYLTALRMFNRTYKLYSYSYLGLGLMSARLAILGGVEGQPAKDGKELVSPCLSPSFKGEWEHAEVTYRVSGQKAAASLHELCAARVSEVLQNRVHRTEEVKHVDFYAFSYYYDLAAGVGLIDAEKGGSLVVGDFEIAAKYVCRTLETQPQSSPFSCMDLTYVSLLLQEFGFPRSKVLKLTRKIDNVETSWALGAIFHYIDSLNRQKSPAS

SEQ ID NO: 5705 - DNA, 3818 bp, Homo sapiens
gagcagctgcaccatcccggcgttcgcgtgtgccgccgctttcctcctccatctcttttcctccgcctccgccggcgcgatggcgaagccgctgacggacagcgagaagcggaagcagatcagcgtgcgcggcctggcggggctaggcgacgtggccgaggtgcggaagagcttcaaccggcacttgcacttcacgctggtcaaggaccgcaatgtggccacgccccgcgactacttcttcgcgctggcgcacacggtgcgcgaccacctcgtgggccgctggatccgcacgcagcagcactactacgagcgcgaccccaagcgcatttattatctttccctggaattctacatgggtcgcacgctgcagaacacgatggtgaacctgggccttcagaatgcctgcgatgaagccatctatcagttggggttagacttggaggaactcgaggagatagaagaagatgctggccttgggaatggaggcctggggaggctggcagcgtgtttccttgactcaatggctaccttgggcctggcagcatacggctatggaatccgctatgaatttgggatttttaaccagaagattgtcaatggctggcaggtagaggaggccgatgactggctgcgctacggcaacccctgggagaaagcgcggcctgagtatatgcttcccgtgcacttctacggacgcgtggagcacacccccgacggcgtgaagtggctggacacacaggtggtgctggccatgccctacgacaccccagtgcccggctacaagaacaacaccgtcaacaccatgcggctgtggtccgccaaggctcccaacgacttcaagctgcaggacttcaacgtgggagactacatcgaggcggtcctggaccggaacttggctgagaacatctccagggtcctgtatccaaatgataacttctttgaggggaaggagctgcggctgaagcaggagtacttcgtggtggccgccacgctccaggacatcatccgccgcttcaagtcgtccaagttcggctgccgggaccctgtgagaacctgtttcgagacgttcccagacaaggtggccatccagctgaacgacacccaccccgccctctccatccctgagctcatgcggatcctggtggacgtggagaaggtggactgggacaaggcctgggaaatcacgaagaagacctgtgcatacaccaaccacactgtgctgcctgaggccttggagcgctggcccgtgtccatgtttgagaagctgctgccgcggcacctggagataatctatgccatcaaccagcggcacctggaccacgtggccgcgctgtttcccggcgatgtggaccgcctgcgcaggatgtctgtgatcgaggagggggactgcaagcggatcaacatggcccacctgtgtgtgattgggtcccatgctgtcaatggtgtggcgaggatccactcggagatcgtgaaacagtcggtctttaaggatttttatgaactggagccagagaagttccagaataagaccaatggcatcaccccccgccggtggctgctgctgtgcaacccggggctggccgataccatcgtggagaaaattggggaggagttcctgactgacctgagccagctgaagaagctgctgccgctggtcagtgacgaggtgttcatcagggacgtggccaaggtcaaacaggagaacaagctcaagttctcggccttcctggagaaggagtacaaggtgaagatcaacccctcctccatgttcgatgtgcatgtgaagaggatccacgagtacaagcggcagctgctcaactgcctgcacgtcgtcaccctgtacaatcgaatcaagagagacccggccaaggcttttgtgcccaggactgttatgattgggggcaaggcagcgcccggttaccacatggccaagctgatcatcaagttggtcacctccatcggcgacgtcgtcaatcatgacccagttgtgggtgacaggttgaaagtgatcttcctggagaactaccgtgtgtccttggctgagaaagtgatcccggccgctgatctgtcgcagcagatctccactgcaggcaccgaggcctcaggcacaggcaacatgaagttcatgctcaacggggccctcaccatcggcaccatggacggcgccaacgtggagatggccgaggaggccggggccgagaacctcttcatcttcggcctgcgggtggaggatgtcgaggccttggaccggaaagggtacaatgccagggagtactacgaccacctgcccgagctgaagcaggccgtggaccagatcagcagtggctttttttctcccaaggagccagactgcttcaaggacatcgtgaacatgctgatgcaccatgacaggttcaaggtgtttgcagactatgaagcctacatgcagtgccaggcacaggtggaccagctgtaccggaaccccaaggagtggaccaagaaggtcatcaggaacatcgcctgctcgggcaagttctccagtgaccggaccatcacggagtatgcacgggagatctggggtgtggagccctccgacctgcagcttcagcacctgccccacccagagtgggagtcaggtggagccacctgctgggctcccccagaactttgcacacatcttgctatgtattagccgatgtctttagtgttgagcctctggattctggggtctgggccagtggccatagtgaagcctgggaatgagtgttactgcagcatctgggctgccagccacagggaagggccaagccccatgtagccccagtcatcctgcccagccctgcctcctggccatgccgggaggggtcggatcctctaggcatcgccttcacagccccctgccccctgccctctgtcctggctctgcacctggtatatgggtcatggacccagatggggctttccctttgtagccatccaatgggcattgtgtgggtgcttggaacccgggatgactgagggggacactggagtgggtgcttgtgtctgctgtctcagaggccttggtcaggatgaagttggctgacacagcttagcttggttttgcttattcaaaagagaaaataactacacatggaaatgaaactagctgaagccttttcttgttttagcaactgaaaattgtacttggtcacttttgtgcttgaggaggcccattttctgcctggcagggggcaggtctgtgccctcccgctgactcctgctgtgtcctgaggtgcatttcctgttgtacacacaagggccaggctccattctccctccctttccaccagtgccacagcctcgtctggaaaaaggaccaggggtcccggaggaacccatttgtgctctgcttggacagcaggcctggcactgggaggtgggggtgagcccctcacagccttgcccctccccaaggctggcaacctgcctcccattgcccaagagagagggcagggaacaggctactgtccttccctgtggaattgccgagaaatctagcaccttgcatgctggatctgggctgcggggaggctctttttctccctggcctccagtgcccaccaggaggatctgcgcacggtgcacagcccaccagagcactacagccttttattgagtggggcaagtgctgggctgtggtcgtgccctgacagcatcttccccaggcagcggctctgtggaggaggccatactcccctagttggccactggggccaccaccctgaccaccactgtgcccctcattgttactgccttgtgagataaaaactgattaaacctttgtggctgtggttggc

SEQ ID NO: 5706 - DNA, 2337 bp, Homo sapiens
aggctacggttcgcgccagcggccggcgctatggggctgagccgcgtgcgggcggttttctttgacttggacaacactctcatcgacacggccggggcgagcaggagaggcatgttggaggtgataaaactcttacaatcaaaataccattataaagaagaggctgaaatcatctgtgataaagttcaagttaaactcagcaaggaatgttttcatccttacaatacatgcattactgatttaaggacttcacattgggaagaagcaatccaggaaacaaaaggtggtgcagccaatagaaaattggctgaagaatgttatttcctttggaaatctacacgtttacagcatatgacactagcagaagacgtcaaagccatgcttactgaacttcgaaaggaggtccgcctacttctattaacgaatggggacagacagacccagagggagaagattgaggcttgtgcctgtcagtcctattttgacgctgttgttgtaggtggagagcagagagaggagaaaccagcaccgtccatattttattactgctgcaatcttctcggagtacaacctggggactgtgtgatggtcggtgacacattagaaaccgacatccaaggaggcctcaatgcaggattgaaagcaacagtctggatcaataaaaatggaatagtgccactgaagtcctccccagttccgcattacatggtttcttctgtgctagagttacctgctctcttacaaagtatagactgcaaagtcagtatgtccacttaaagcacataaaagggcatgattatgaatgttagaatcaatttgctgagtatgaaataagaaaagttagggcactccacttatgataatccagctctaagaataattttacttatgatttaatggccaatattttgaaggtcttcccaaccctattgcttctaagttgtaacaaccaaccattgagtggtacttatatctgaaaattcagattgcatgaattcaggtcagtagtatagcccagaaaatttaaggaaatatattatttgttagtctgtatctggagctttttaaaattatgttattaatcttttagtatcttggctgcataatgccaagcaggattgctttacacatggatgcacaaatgtaaggtttatcttctggcttaaaaatagatatttttaaaaaatagattttctaaaacacagatttatgaaagcaagtgaatctggttaatatgaaataagtactaagtcacatgcaaatcaaggtattatatagtgaaattattttgcatattttgaaaacataaaccatagtttttgcctactttggatgtatactttcttttatgaacctgatttttctgtatgacatttttttttttttcagagggcagggagcaatttttctatggcatgtgacagattcctccagttagaaaaagctgttaaaatcaacacatggtgctcctttaccgtgacattttctcacctgtgcacagtgagccggtagcttccttttagtcttcacctctcaaggaaatgtttttactgtcttttcccagacacacagtggggttgagggagctaggctgttttgctagagataattgcaaggcacgtggcactaaaagtcatttttcttctgtggatccataagaggaacatttcctcagtgtagcctaacaatgcagcccccaatctgttcctttttttttttgaaatgggatctctgtcgcccaggttggagtgccatggcaccatctcggctcactgcaacctctgcctcctgagctcaagtgatcctcccacctcagcctcccaagggtgtgtgtgactacaagtacacactaccacgcccagctaatgtgtgtttttgtagagatgggattttgccatgttgcccaggctggtctcgaattcctggattcaagtgatcctcccacctcagcctcctaaagtcctaggattataggcatgagccactgtgcctggccccctcatctgatagaaaattagattttgctatgagccatttcctgagggccaatttaatactcgtgtgactcttcttagagttaccatctgccttaaatttcctctgtttttcacattcttggaaatatatcattgttttgcaaatttctatatctaattcagggtttaccaggagcttaataattaatggctacatagcaaggcatcgtcttggaaccggagaattttctctagactattaggctagacagtctcatgattatactaaccaaacctggagtaaagtggttgaaaaaaaagaaagtataaaggggcttattaaagtggttaataaatatga

SEQ ID NO: 5707 - protein, 248 aa, Homo sapiens
MGLSRVRAVFFDLDNTLIDTAGASRRGMLEVIKLLQSKYHYKEEAEIICDKVQVKLSKECFHPYNTCITDLRTSHWEEAIQETKGGAANRKLAEECYFLWKSTRLQHMTLAEDVKAMLTELRKEVRLLLLTNGDRQTQREKIEACACQSYFDAVVVGGEQREEKPAPSIFYYCCNLLGVQPGDCVMVGDTLETDIQGGLNAGLKATVWINKNGIVPLKSSPVPHYMVSSVLELPALLQSIDCKVSMST

SEQ ID NO: 5708 - DNA, 1738 bp, Homo sapiens
cttcctgttgccttaggggaacgtggctttccctgcagagccggtgtctccgcctgcgtccctgctgcagcaaccggagctggagtcggatcccgaacgcaccctcgccatggactcggccctcagcgatccgcataacggcagtgccgaggcaggcggccccaccaacagcactacgcggccgccttccacgcccgagggcatcgcgctggcctacggcagcctcctgctcatggcgctgctgcccatcttcttcggcgccctgcgctccgtacgctgcgcccgcggcaagaatgcttcagacatgcctgaaacaatcaccagccgggatgccgcccgcttccccatcatcgccagctgcacactcttggggctctacctctttttcaaaatattctcccaggagtacatcaacctcctgctgtccatgtatttcttcgtgctgggaatcctggccctgtcccacaccatcagccccttcatgaataagttttttccagccagctttccaaatcgacagtaccagctgctcttcacacagggttctggggaaaacaaggaagagatcatcaattatgaatttgacaccaaggacctggtgtgcctgggcctgagcagcatcgttggcgtctggtacctgctgaggaagcactggattgccaacaacctttttggcctggccttctcccttaatggagtagagctcctgcacctcaacaatgtcagcactggctgcatcctgctgggcggactcttcatctacgatgtcttctgggtatttggcaccaatgtgatggtgacagtggccaagtccttcgaggcaccaataaaattggtgtttccccaggatctgctggagaaaggcctcgaagcaaacaactttgccatgctgggacttggagatgtcgtcattccagggatcttcattgccttgctgctgcgctttgacatcagcttgaagaagaatacccacacctacttctacaccagctttgcagcctacatcttcggcctgggccttaccatcttcatcatgcacatcttcaagcatgctcagcctgccctcctatacctggtccccgcctgcatcggttttcctgtcctggtggcgctggccaagggagaagtgacagagatgttcagctacgagtcctcggcggaaatcctgcctcataccccgaggctcacccacttccccacagtctcgggctccccagccagcctggccgactccatgcagcagaagctagctggccctcgccgccggcgcccgcagaatcccagcgccatttatgaggagtcaaatcctaaggatccagcggcagtgacagaatccaaagagggaacagaggcatcagcatcgaaggggctggagaagaaagagaaatgatgcagctggtgcccgagcctctcagggccagaccagacagatgggggctgggcccacacaggcgtgcaccggtagagggcacaggaggccaagggcagctccaggacagggcagggggcagcaggatacctccagccaggcctctgtggcctctgtttccttctccctttcttggccctcctctgctcctccccacaccctgcaggcaaaagaaacccccagcttcccccctccccgggagccaggtgggaaaagtgggtgtgatttttagattttgtattgtggactgattttgcctcacattaaaaactcatcccatggccagggcgggccactgtgctcctggaa

SEQ ID NO: 5709 - protein, 377 aa, Homo sapiens
MDSALSDPHNGSAEAGGPTNSTTRPPSTPEGIALAYGSLLLMALLPIFFGALRSVRCARGKNASDMPETITSRDAARFPIIASCTLLGLYLFFKIFSQEYINLLLSMYFFVLGILALSHTISPFMNKFFPASFPNRQYQLLFTQGSGENKEEIINYEFDTKDLVCLGLSSIVGVWYLLRKHWIANNLFGLAFSLNGVELLHLNNVSTGCILLGGLFIYDVFWVFGTNVMVTVAKSFEAPIKLVFPQDLLEKGLEANNFAMLGLGDVVIPGIFIALLLRFDISLKKNTHTYFYTSFAAYIFGLGLTIFIMHIFKHAQPALLYLVPACIGFPVLVALAKGEVTEMFSYEESNPKDPAAVTESKEGTEASASKGLEKKEK

SEQ ID NO: 5710 - DNA, 1205 bp, Homo sapiens
gttccattttccgtatctgcttcgggcttccacctcatttttttcgctttgcccattctgtttcagccagtcgccaagaatcatgaaagtcgccagtggcagcaccgccaccgccgccgcgggccccagctgcgcgctgaaggccggcaagacagcgagcggtgcgggcgaggtggtgcgctgtctgtctgagcagagcgtggccatctcgcgctgcgccgggggcgccggggcgcgcctgcctgccctgctggacgagcagcaggtaaacgtgctgctctacgacatgaacggctgttactcacgcctcaaggagctggtgcccaccctgccccagaaccgcaaggtgagcaaggtggagattctccagcacgtcatcgactacatcagggaccttcagttggagctgaactcggaatccgaagttggaacccccgggggccgagggctgccggtccgggctccgctcagcaccctcaacggcgagatcagcgccctgacggccgaggtgagatccagatccgaccactagatcatccttataccgacggggaaacggaggccagagagggcgtgggcgcttgcaccacttccgtcccatccttgcgggtacctggctatgcgggggtgcctaaggagcctggaaaaagcgctcccccgtcgtgcttcctggggaagggggcgttcgctgcgctcggagcggcgtcccttccaacccgccggtctcatttcttctcgttttcacaggcggcatgcgttcctgcggacgatcgcatcttgtgtcgctgaagcgcctcccccagggaccggcggaccccagccatccagggggcaagaggaattacgtgctctgtgggtctcccccaacgcgcctcgccggatctgagggagaacaagaccgatcggcggccactgcgcccttaactgcatccagcctggggctgaggctgaggcactggcgaggagagggcgctcctctctgcacacctactagtcaccagagactttagggggtgggattccactcgtgtgtttctattttttgaaaagcagacattttaaaaaatggtcacgtttggtgcttctcagatttctgaggaaattgctttgtattgtatattacaatgatcaccgactgaaaatattgttttacaatagttctgtggggctgtttttttgttattaaacaaataatttagatggtg

SEQ ID NO: 5711 - protein, 155 aa, Homo sapiens
MKVASGSTATAAAGPSCALKAGKTASGAGEVVRCLSEQSVAISRCAGGAGARLPALLDEQQVNVLLYDMNGCYSRLKELVPTLPQNRKVSKVEILQHVIDYIRDLQLELNSESEVGTPGGRGLPVRAPLSTLNGEISALTAEAACVPADDRILCR

SEQ ID NO: 5712 - DNA, 463 bp, Homo sapiens
gagggagggggctatagctacaggaagcaccccatgccaaagctagggtggcccttgcagttcagcaccaccctagtcccttcccctccctggctcccatgaccatactgagggaccaactgggcccaagacagatgccccagagctgtttatggcctcagctgcctcacttcctacaagagcagcctgtggcatctttgccttgggctgctcctcatggtgggttcaggggactcagccctgaggtgaaagggagctatcaggaacagctatgggagccccagggtcttccctacctcaggcaggaagggcaggaaggagagcctgctgcatggggtggggcctggctcctgaggggcatctgcccctcccccaacccccaccccacacttgttccagctctttgaaatagtctgtgtgaaggtgaaagtgcagttcagtaataaactgtgtttactcagtg

SEQ ID NO: 5713 - DNA, 2575 bp, Homo sapiens
ggaggaggaagcaagcgagggggctggttcctgagcttcgcaattcctgtgtcgccttctgggctcccagcctgccgggtcgcatgatccctccggccggagctggtttttttgccagccaccgcgaggccggctgagttaccggcatccccgcagccacctcctctcccgacctgtgatacaaaagatcttccgggggctgcacctgcctgcctttgcctaaggcggatttgaatctctttctctcccttcagaatcttatcttggctttggatcttagaagagaatcactaaccagagacgagactcagtgagtgagcaggtgttttggacaatggactggttgagcccatccctattataaaaatgtctcagagcaaccgggagctggtggttgactttctctcctacaagctttcccagaaaggatacagctggagtcagtttagtgatgtggaagagaacaggactgaggccccagaagggactgaatcggagatggagacccccagtgccatcaatggcaacccatcctggcacctggcagacagccccgcggtgaatggagccactggccacagcagcagtttggatgcccgggaggtgatccccatggcagcagtaaagcaagcgctgagggaggcaggcgacgagtttgaactgcggtaccggcgggcattcagtgacctgacatcccagctccacatcaccccagggacagcatatcagagctttgaacaggtagtgaatgaactcttccgggatggggtaaactggggtcgcattgtggcctttttctccttcggcggggcactgtgcgtggaaagcgtagacaaggagatgcaggtattggtgagtcggatcgcagcttggatggccacttacctgaatgaccacctagagccttggatccaggagaacggcggctgggatacttttgtggaactctatgggaacaatgcagcagccgagagccgaaagggccaggaacgcttcaaccgctggttcctgacgggcatgactgtggccggcgtggttctgctgggctcactcttcagtcggaaatgaccagacactgaccatccactctaccctcccacccccttctctgctccaccacatcctccgtccagccgccattgccaccaggagaaccactacatgcagcccatgcccacctgcccatcacagggttgggcccagatctggtcccttgcagctagttttctagaatttatcacacttctgtgagacccccacacctcagttcccttggcctcagaattcacaaaatttccacaaaatctgtccaaaggaggctggcaggtatggaagggtttgtggctgggggcaggagggccctacctgattggtgcaacccttaccccttagcctccctgaaaatgtttttctgccagggagcttgaaagttttcagaacctcttccccagaaaggagactagattgcctttgttttgatgtttgtggcctcagaattgatcattttccccccactctccccacactaacctgggttccctttccttccatccctaccccctaagagccatttaggggccacttttgactagggattcaggctgcttgggataaagatgcaaggaccaggactccctcctcacctctggactggctagagtcctcactcccagtccaaatgtcctccagaagcctctggctagaggccagccccacccaggagggagggggctatagctacaggaagcaccccatgccaaagctagggtggcccttgcagttcagcaccaccctagtcccttcccctccctggctcccatgaccatactgagggaccaactgggcccaagacagatgccccagagctgtttatggcctcagctgcctcacttcctacaagagcagcctgtggcatctttgccttgggctgctcctcatggtgggttcaggggactcagccctgaggtgaaagggagctatcaggaacagctatgggagccccagggtcttccctacctcaggcaggaagggcaggaaggagagcctgctgcatggggtggggtagggctgactagaagggccagtcctgcctggccaggcagatctgtgccccatgcctgtccagcctgggcagccaggctgccaaggccagagtggcctggccaggagctcttcaggcctccctctctcttctgctccacccttggcctgtctcatccccaggggtcccagccaccccgggctctctgctgtacatatttgagactagtttttattccttgtgaagatgatatactatttttgttaagcgtgtctgtatttatgtgtgaggagctgctggcttgcagtgcgcgtgcacgtggagagctggtgcccggagattggacggcctgatgctccctcccctgccctggtccagggaagctggccgagggtcctggctcctgaggggcatctgcccctcccccaacccccaccccacacttgttccagctctttgaaatagtctgtgtgaaggtgaaagtgcagttcagtaataaactgtgtttactcagtgaaaaaaaaaaaaaaaaaa

SEQ ID NO: 5714 - protein, 233 aa, Homo sapiens
MSQSNRELVVDFLSYKLSQKGYSWSQFSDVEENRTEAPEGTESEMETPSAINGNPSWHLADSPAVNGATGHSSSLDAREVIPMAAVKQALREAGDEFELRYRRAFSDLTSQLHITPGTAYQSFEQVVNELFRDGVNWGRIVAFFSFGGALCVESVDKEMQVLVSRIAAWMATYLNDHLEPWIQENGGWDTFVELYGNNAAAESRKGQERFNRWFLTGMTVAGVVLLGSLFSRK

SEQ ID NO: 5715 - DNA, 3415 bp, Homo sapiens
gggagcagctagggcgcgggtctccctcctcccggagtttggaacggctgaagttcaccttccagcccctagcgccgttcgcgccgctaggcctggcttctgaggcggttgcggtgctcggtcgccgcctaggcggggcagggtgcgagcaggggcttcgggccacgcttctcttggcgacaggattttgctgaagtccgtccgggaaacggaggaaaaaaagagttgcgggaggctgtcggctaataacggttcttgatacatatttgccagacttcaagatttcagaaaaggggtgaaagagaagattgcaactttgagtcagacctgtaggcctgatagactgattaaaccacagaaggtgacctgctgagaaaagtggtacaaatactgggaaaaacctgctcttctgcgttaagtgggagacaatgtcacaagttaaaagctcttattcctatgatgccccctcggatttcatcaatttttcatccttggatgatgaaggagatactcaaaacatagattcatggtttgaggagaaggccaatttggagaataagttactggggaagaatggaactggagggctttttcagggcaaaactcctttgagaaaggctaatcttcagcaagctattgtcacacctttgaaaccagttgacaacacttactacaaagaggcagaaaaagaaaatcttgtggaacaatccattccgtcaaatgcttgttcttccctggaagttgaggcagccatatcaagaaaaactccagcccagcctcagagaagatctcttaggctttctgctcagaaggatttggaacagaaagaaaagcatcatgtaaaaatgaaagccaagagatgtgccactcctgtaatcatcgatgaaattctaccctctaagaaaatgaaagtttctaacaacaaaaagaagccagaggaagaaggcagtgctcatcaagatactgctgaaaagaatgcatcttccccagagaaagccaagggtagacatactgtgccttgtatgccacctgcaaagcagaagtttctaaaaagtactgaggagcaagagctggagaagagtatgaaaatgcagcaagaggtggtggagatgcggaaaaagaatgaagaattcaagaaacttgctctggctggaatagggcaacctgtgaagaaatcagtgagccaggtcaccaaatcagttgacttccacttccgcacagatgagcgaatcaaacaacatcctaagaaccaggaggaatataaggaagtgaactttacatctgaactacgaaagcatccttcatctcctgcccgagtgactaagggatgtaccattgttaagcctttcaacctgtcccaaggaaagaaaagaacatttgatgaaacagtttctacatatgtgccccttgcacagcaagttgaagacttccataaacgaacccctaacagatatcatttgaggagcaagaaggatgatattaacctgttaccctccaaatcttctgtgaccaagatttgcagagacccacagactcctgtactgcaaaccaaacaccgtgcacgggctgtgacctgcaaaagtacagcagagctggaggctgaggagctcgagaaattgcaacaatacaaattcaaagcacgtgaacttgatcccagaatacttgaaggtgggcccatcttgcccaagaaaccacctgtgaaaccacccaccgagcctattggctttgatttggaaattgagaaaagaatccaggagcgagaatcaaagaagaaaacagaggatgaacactttgaatttcattccagaccttgccctactaagattttggaagatgttgtgggtgttcctgaaaagaaggtacttccaatcaccgtccccaagtcaccagcctttgcattgaagaacagaattcgaatgcccaccaaagaagatgaggaagaggacgaaccggtagtgataaaagctcaacctgtgccacattatggggtgccttttaagccccaaatcccagaggcaagaactgtggaaatatgccctttctcgtttgattctcgagacaaagaacgtcagttacagaaggagaagaaaataaaagaactgcagaaaggggaggtgcccaagttcaaggcacttcccttgcctcattttgacaccattaacctgccagagaagaaggtaaagaatgtgacccagattgaacctttctgcttggagactgacagaagaggtgctctgaaggcacagacttggaagcaccagctggaagaagaactgagacagcagaaagaagcagcttgtttcaaggctcgtccaaacaccgtcatctctcaggagccctttgttcccaagaaagagaagaaatcagttgctgagggcctttctggttctctagttcaggaaccttttcagctggctactgagaagagagccaaagagcggcaggagctggagaagagaatggctgaggtagaagcccagaaagcccagcagttggaggaggccagactacaggaggaagagcagaaaaaagaggagctggccaggctacggagagaactggtgcataaggcaaatccaatacgcaagtaccagggtctggagataaagtcaagtgaccagcctctgactgtgcctgtatctcccaaattctccactcgattccactgctaaactcagctgtgagctgcggataccgcccggcaatgggacctgctcttaacctcaaacctaggaccgtcttgctttgtcattgggcatggagagaacccatttctccagacttttacctacccgtgcctgagaaagcatacttgacaactgtggactccagttttgttgagaattgttttcttacattactaaggctaataatgagatgtaactcatgaatgtctcgattagactccatgtagttacttcctttaaaccatcagccggccttttatatgggtcttcactctgactagaatttagtctctgtgtcagcacagtgtaatctctattgctattgccccttacgactctcaccctctccccactttttttaaaaattttaaccagaaaataaagatagttaaatcctaagatagagattaagtcatggtttaaatgaggaacaatcagtaaatcagattctgtcctcttctctgcataccgtgaatttatagttaaggatccctttgctgtgagggtagaaaacctcaccaactgcaccagtgaggaagaagactgcgtggattcatggggagcctcacagcagccacgcagcaggctctgggtggggctgccgttaaggcacgttctttccttactggtgctgataacaacagggaaccgtgcagtgtgcattttaagacctggcctggaataaatacgttttgtctttccctcaaaaaaaaaaaaaaaaaaaaaaa

SEQ ID NO: 5716 - protein, 747 aa, Homo sapiens
MSQVKSSYSYDAPSDFINFSSLDDEGDTQNIDSWFEEKANLENKLLGKNGTGGLFQGKTPLRKANLQQAIVTPLKPVDNTYYKEAEKENLVEQSIPSNACSSLEVEAAISRKTPAQPQRRSLRLSAQKDLEQKEKHHVKMKAKRCATPVIIDEILPSKKMKVSNNKKKPEEEGSAHQDTAEKNASSPEKAKGRHTVPCMPPAKQKFLKSTEEQELEKSMKMQQEVVEMRKKNEEFKKLALAGIGQPVKKSVSQVTKSVDFHFRTDERIKQHPKNQEEYKEVNFTSELRKHPSSPARVTKGCTIVKPFNLSQGKKRTFDETVSTYVPLAQQVEDFHKRTPNRYHLRSKKDDINLLPSKSSVTKICRDPQTPVLQTKHRARAVTCKSTAELEAEELEKLQQYKFKARELDPRILEGGPILPKKPPVKPPTEPIGFDLEIEKRIQERESKKKTEDEHFEFHSRPCPTKILEDVVGVPEKKVLPITVPKSPAFALKNRIRMPTKEDEEEDEPVVIKAQPVPHYGVPFKPQIPEARTVEICPFSFDSRDKERQLQKEKKIKELQKGEVPKFKALPLPHFDTINLPEKKVKNVTQIEPFCLETDRRGALKAQTWKHQLEEELRQQKEAACFKARPNTVISQEPFVPKKEKKSVAEGLSGSLVQEPFQLATEKRAKERQELEKRMAEVEAQKAQQLEEARLQEEEQKKEELARLRRELVHKANPIRKYQGLEIKSSDQPLTVPVSPKFSTRFHC

SEQ ID NO: 5717 - DNA, 1316 bp, Homo sapiens
ggcaggctattccggacgccagccctggaagctgagcctgacccagcaggtcccagcagcctggcagcccggccagcatgcagcagcagcctctgcccgggcctggcgcccccacaactgagccaaccaagcctccctacagctacatcgcccttattgctatggccatccagagctcaccggggcagcgggccaccctcagtggcatctaccgctacatcatgggccgattcgccttctaccgccacaaccggcccggctggcagaacagcatccgccacaacctgtcactcaacgagtgctttgtcaaggtgccccgcgatgaccgcaagccaggcaagggcagctactggacgctggaccctgactgccacgacatgtttgagcacggcagcttcctacgccgccgccgccgcttcacccggcagacaggtgctgagggcacccggggccccgccaaggcacgccgtggacccctcagggcgaccagccaggacccaggagtccccaacgccacgaccggcaggcagtgctcattcccaccagagctgccagatcccaagggcctaagctttgggggtctggtgggggccatgccagccagtatgtgcccagcaaccactgatggcaggcctcggccacccatggagcccaaagagatttccacgcccaagcctgcatgcccaggggagctccccgtggccacctcatcttcctcatgcccagcgtttggctttcctgccggcttctcagaggctgagagttttaataaggcccctacgcccgtcttgtccccggaatcaggcatcgggagcagctaccagtgtcggctgcaggcactgaatttttgcatgggggctgacccaggccttgagcacctcttggcctcagcagccccctcccctgcaccacccacccctccaggctcactccgggccccactgcccctgccaactgaccacaaggaaccctgggttgcaggtggcttccctgtccagggaggctccggctacccattggggctgaccccctgcctataccggacgccaggaatgttcttctttgagtaaaggcagcctcacctcgggcagtccctgcaggtccctcaccctccgggctgagcctggctctaggacctgaagaactctcgaaggacccagccctggtgagccaaggacaaccacacagaaagccaggattgaagcggtgctcagccaggcccctggggcctccggacaaacttgggggtgaggggaagcagggcctcttgggatttactctgtggctctcagggccaataaagccatgtgatgatg

SEQ ID NO: 5718 - protein, 330 aa, Homo sapiens
MQQQPLPGPGAPTTEPTKPPYSYIALIAMAIQSSPGQRATLSGIYRYIMGRFAFYRHNRPGWQNSIRHNLSLNECFVKVPRDDRKPGKGSYWTLDPDCHDMFEHGSFLRRRRRFTRQTGAEGTRGPAKARRGPLRATSQDPGVPNATTGRQCSFPPELPDPKGLSFGGLVGAMPASMCPATTDGRPRPPMEPKEISTPKPACPGELPVATSSSSCPAFGFPAGFSEAESFNKAPTPVLSPESGIGSSYQCRLQALNFCMGADPGLEHLLASAAPSPAPPTPPGSLRAPLPLPTDHKEPWVAGGFPVQGGSGYPLGLTPCLYRTPGMFFFE

SEQ ID NO: 5719 - DNA, 1322 bp, Homo sapiens
ggcacgaggatcccggggtcgcgcgagagccgcaagcggagttggtgggcgctatgctatcacccgaggcagagcgagtgctgcggtaccttgtagaagtggaggagctcgccgaggaggtgctggcggacaagcggcagattgtggacctggacactaaaaggaatcagaatcgagagggcctgagggccctgcagaaggatctcagcctctctgaagatgtgatggtttgcttcgggaacatgtttatcaagatgcctcaccctgagacaaaggaaatgattgaaaaagatcaagatcatctggataaagaaatagaaaaactgcggaagcaacttaaagtgaaggtcaaccgcctttttgaggcccaaggcaaaccggagctgaagggttttaacttgaaccccctcaaccaggatgagcttaaagctctcaaggtcatcttgaaaggatgagactcaagaaccaagatgggggaccagcaaccccccagggtcatggaggacccaggaccctccaaccttgacacctgtaaggacaggatctgccctgtaaggggccagccgtcaggaatctggccatgaaaacctctttgtagtgcttggctactctgtgatggcaggagggaaccttcagcctgtctggctgctggacctggacaccagggctcggtggacacaagatctattgacgggccttggtagccaccagtgggtgtgtggggcagtggctgtgggggtgtaagaatgactgcaacaggcacttcccaacaatggcctgctgttcacatggaccctgagcaaggaaggagggagggaggggcagagtggagtgtcattccagcattcctctcagaagggagagaggttttcaggctggtgccatgcgattggaataaagcaggaggctcatgggtggttgctgaatgaagaacagaatcttggtgctttgtggctcaccacagccatctgtggggcaggcacacacacctcccgccagctccaattttgcactttttccctgcttgattccaagagtaggtgctgcctagcagcccttcgtggccactctttactcaggagggccttgcagagtcctgcaccaggcctgggtgagtggatgcgcctcttaccatatgacacgtgtcaagatgcccttccgccccctctgaaagtggggcccggccagcactgctcgttactgtctgccttcagtggtctgaggtcccagtatgaactgccgtgaagtcaaaactcttatgtgttcattaagggctcaataaatgttagctgaatgaaaaaaaaaaaaaaaaaaaaaaaaaa

SEQ ID NO: 5720 - protein, 133 aa, Homo sapiens
MLSPEAERVLRYLVEVEELAEEVLADKRQIVDLDTKRNQNREGLRALQKDLSLSEDVMVCFGNMFIKMPHPETKEMIEKDQDHLDKEIEKLRKQLKVKVNRLFEAQGKPELKGFNLNPLNQDELKALKVILKG

SEQ ID NO: 5721 - DNA, 4028 bp, Homo sapiens
ccaagatggcgacggcgatggtgagtgaaggagactccgggagcgggagctggagcggggccctccggggtatcccaggatcttccagcaccccatgcctggccctgagccacctccgggacccctgactcaggcctgagggctacctctgactgggcttgtcttccccgaaatccacctccctggccctgcccctgcactcaggcttgtgaaggccccgagttttgggggaggcgccgtttcggaggaagacctcggctgctgccttcgccggttcccattctacttttggtctccgcccactgattggttgccgtggtctttactgcttttctccctgatgtgtgaaacaagcgccttctatgtgcctggggtcgcgcctatcaacttccaccagaacgatcccgtagaaatcaaggctgtgaagctcaccagctctcgaacccagctaccttatgaatactattcactgcccttctgccagcccagcaagataacctacaaggcagagaatctgggagaggtgctgagaggggaccggattgtcaacacccctttccaggttctcatgaacagcgagaagaagtgtgaagttctgtgcagccagtccaacaagccagtgaccctgacagtggagcagagccgactcgtggccgagcggatcacagaagactactacgtccacctcattgctgacaacctgcctgtggccacccggctggagctctactccaaccgagacagcgatgacaagaagaaggaaaaagatgtgcagtttgaacacggctaccggctcggcttcacagatgtcaacaagatctacctgcacaaccacctctcattcatcctttactatcatcgggaggacatggaagaggaccaggagcacacgtaccgtgtcgtccgcttcgaggtgattccccagagcatcaggctggaggacctcaaagcagatgagaagagttcgtgcactctgcctgagggtaccaactcctcgccccaagaaattgaccccaccaaggagaatcagctgtacttcacctactctgtccactgggaggaaagtgatatcaaatgggcctctcgctgggacacttacctgaccatgagtgacgtccagatccactggttttctatcattaactccgttgttgtggtcttcttcctgtcaggtatcctgagcatgattatcattcggaccctccggaaggacattgccaactacaacaaggaggatgacattgaagacaccatggaggagtctgggtggaagttggtgcacggcgacgtcttcaggcccccccagtaccccatgatcctcagctccctgctgggctcaggcattcagctgttctgtatgatcctcatcgtcatctttgtagccatgcttgggatgctgtcgccctccagccggggagctctcatgaccacagcctgcttcctcttcatgttcatgggggtgtttggcggattttctgctggccgtctgtaccgcactttaaaaggccatcggtggaagaaaggagccttctgtacggcaactctgtaccctggtgtggtttttggcatctgcttcgtattgaattgcttcatttggggaaagcactcatcaggagcggtgccctttcccaccatggtggctctgctgtgcatgtggttcgggatctccctgcccctcgtctacttgggctactacttcggcttccgaaagcagccatatgacaaccctgtgcgcaccaaccagattccccggcagatccccgagcagcggtggtacatgaaccgatttgtgggcatcctcatggctgggatcttgcccttcggcgccatgttcatcgagctcttcttcatcttcagtgctatctgggagaatcagttctattacctctttggcttcctgttccttgttttcatcatcctggtggtatcctgttcacaaatcagcatcgtcatggtgtacttccagctgtgtgcagaggattaccgctggtggtggagaaatttcctagtctccgggggctctgcattctacgtcctggtttatgccatcttttatttcgttaacaagctggacatcgtggagttcatcccctctctcctctactttggctacacggccctcatggtcttgtccttctggctgctaacgggtaccatcggcttctatgcagcctacatgtttgttcgcaagatctatgctgctgtgaagatagactgattggagtggaccacggccaagcctgctccgtcctcggacaggaagccaccctgcgtgggggactgcaggcacgcaaaataaaataactcctgctcgtttggaatgtaactcctggcacagtgttcctggatcctggggctgcgtggggggcgggagggcctgtagataatcttgcgtttttcgtcatcttattccagttctgtgggggatgagtttttttgtgggttgctttttcttcagtgctaagaaagttccctccaacaggaactctctgacctgtttattcaggtgtatttctggtttggatttttttttccttctttgttttaacaaatggatccaggatggataaatccaccgagataagggttttggtcactgtctccacctcagttcctcagggctgttggccaccctatgactaactggaagaggacacgccagagcttcagtgaggtttccgagcctctccctgcccatcctcaccactgaggccacgacaaagcacagctccagctcggacagcaccctcagtgccagccagcctctgccagacctctctttccctcttctccccagcctcctccagggctgcccaaggcagggtttccagccaggcctcggggtcatcttttcaccaggagcaaacccaagtcttagttgctacaagaaaatcccctggaagtactgggggccaggttccccagacagcaggaattgcccctgttcagagcagccggagtttgctggaccacaaggaagaagagaagagacttgcagtgaactgtttttgtgccaagaaaccctggacctggggccaagtatttcccaagccaagcatccacttgtctgtgtctgggaagggatggccaaggccgctagggtccttacccctcaggatcactccccagccctttcctcaggaggtaccgctctccaaggtgtgctagcagtgggccctgcccaacttcaggcagaacagggaggcccagagattacagatcccctcctgtaagtggccaggcattctctccctgccctctctggcctctggggtcatactcacttctttagccagccccatcccctccaccccacacctgagttcttgcctcctccttttggggacacccaaaacactgcttgtgagaaggaagatggaaggtaagttctgtcgttctttccccaatccccaggaatggacaagaagccaacttagaaagaagggtctcacgtggctggcctggctcctccgtagacccctgttcttttcaacctctgcccacccgtgcatgtcatcacaaacatttgctcttaagttacaagagaccacatccacccagggattagggttcaagtagcagctgctaacccttgcaccagcccttgtgggactcccaacacaagacaaagctcaggatgctggtgatgctaggaagatgtccctcccctcactgccccacattctcccagtggctctaccagcctcacccatcaaaccagtgaatttctcaatcttgcctcacagtgactgcagcgccaagcggcatccaccaagcatcaagttggagaaaagggaacccaagcagtagagagcgatattggagtcttttgttcattcaaatcttggatttttttttttccctaagagattctctttttagggggaatgggaaacggacacctcataaagggttcaaagatcatcaatttttctgactttttaaatcattatcattattatttttaattaaaaaaatgcctgtatgcctttttttggtcggattgtaaataaatataccattgtcct

SEQ ID NO: 5722 - protein, 625 aa, Homo sapiens
MCETSAFYVPGVAPINFHQNDPVEIKAVKLTSSRTQLPYEYYSLPFCQPSKITYKAENLGEVLRGDRIVNTPFQVLMNSEKKCEVLCSQSNKPVTLTVEQSRLVAERITEDYYVHLIADNLPVATRLELYSNRDSDDKKKEKDVQFEHGYRLGFTDVNKIYLHNHLSFILYYHREDMEEDQEHTYRVVRFEVIPQSIRLEDLKADEKSSCTLPEGTNSSPQEIDPTKENQLYFTYSVHWEESDIKWASRWDTYLTMSDVQIHWFSIINSVVVVFFLSGILSMIIIRTLRKDIANYNKEDDIEDTMEESGWKLVHGDVFRPPQYPMILSSLLGSGIQLFCMILIVIFVAMLGMLSPSSRGALMTTACFLFMFMGVFGGFSAGRLYRTLKGHRWKKGAFCTATLYPGVVFGICFVLNCFIWGKHSSGAVPFPTMVALLCMWFGISLPLVYLGYYFGFRKQPYDNPVRTNQIPRQIPEQRWYMNRFVGILMAGILPFGAMFIELFFIFSAIWENQFYYLFGFLFLVFIILVVSCSQISIVMVYFQLCAEDYRWWWRNFLVSGGSAFYVLVYAIFYFVNKLDIVEFIPSLLYFGYTALMVLSFWLLTGTIGFYAAYMFVRKIYAAVKID

SEQ ID NO: 5723 - DNA, 5637 bp, Homo sapiens
atggcccgaccgccgccactaccggggcctgagggggcctggcggagcccgagcgcggcccggcccgcagcgtggggccccgagcgcggtgaagagattgttttctgaaagctgcgttggaggctgtgacagagctgagagcctgtgtggagcggatggggaggctttctcaataacatggccctttgccattagccttgccatgaccacatttttcaccagcgtccccccctggattcaagatgcaaagcaggaggaggaagtgggctggaaactagttcccaggcctcggggccgggaggcggagagtcaagtgaagtgccaatgtgaaatttcgggaacacctttctcaaatggggagaagctgaggcctcacagcctcccgcaaccagagcagagaccatatagctgccctcagctgcactgtggcaaggcttttgcttccaaatacaagctgtataggcacatggccacccactcagcccagaaaccccaccagtgtatgtactgtgataagatgtttcaccgcaaggaccatctgcggaaccatctgcagacccatgatcctaacaaagaggccctccactgctctgagtgcggtaagaattacaatacgaagctgggctaccggcgccacctggccatgcatgctgccagcagcggtgacctcagctgcaaggtgtgcctgcagacctttgagagtacccaggccctgctagagcacctgaaggcccactcacgccgggtagcaggcggtgccaaggagaagaagcacccctgtgaccactgcgaccggcggttctatactcgtaaggatgtacggcggcacctagtggtgcacacaggccgtaaggacttcctgtgccagtactgtgcccagcggtttggccgtaaggaccacctgacgcgtcatgtcaagaagagccactcgcaggagctgctcaagatcaagacagagcccgtggacatgttaggcctactcagctgcagctccacagtcagtgtgaaggaagagctgagccctgtgctgtgcatggcctctcgggacgtaatggggaccaaggccttccctggcatgttgcccatgggcatgtatggtgcccacatccctaccatgcccagcacgggcgtgccacactccctggtgcacaacacgctgcccatgggtatgagctaccctctggaatcctcacctatctcttccccagctcagctccctccaaaataccagcttggatctacctcatacttgcccgacaaattgcccaaagtggaggtggatagttttctggcggagcttcctggaagcctgtctctctcatccgctgaaccccagcccgcctcacctcagccggcggcagctgcggccctcctagatgaagcactgcttgccaagagccccgccaacctctctgaggccctctgcgctgctaatgtggacttctcccacctactgggctttcttccactcaacctgcccccgtgtaacccacctggggccacaggaggcctggtcatgggctactcccaggctgaggcacagcccctgcttaccactttgcaagctcagcctcaagattccccaggagctgggggaccactgaactttgggcctctgcactccttgcctcctgtcttcacgtctggcctgagtagcaccaccctgcctcgtttccatcaagcattccagtagcccccacagaggccctcagctcagtttttggctctgttatggagccttagtacccaccccgtctgtgtcccccatgaaggcagctgagctttcagagctgggttcaaaaaaaaaaattccagtgtctgtatacaggagcacttggtttgggggttcaggctctaggatcgattccagaaggagccttgagccccaaccccgtgaaaagatctcataccgtaggacttcaggtattatttacttttatttttttgacctgaatcgggagccacacttggccctcttcctctccaaagcgccagaacctccttctctttggagaatggggaggcctcttggagacacagagggtttcaccttggatgacctctagagaaattgcccaagaagcccaccttctggtcccaacctgcagaccccacagcagtcagttggtcaggccctgctgtagaaggtcacttggctccattgcctgcttccaaccaatgggcaggagagaaggcctttatttctcgcccacccattcctcctgtaccagcacctccgttttcagtcagtgttgtccagcaacggtaccgtttacacagtcacctcagacacaccatttcacctcccttgccaagctgttagccttagagtgattgcagtgaacactgtttacacaccgtgaatccattcccatcagtccattccagttggcaccagcctgaaccatttggtacctggtgttaactggagtcctgtttacaaggtggagtcggggcttgctgacttctcttcatttgaggtcacatttttcccccgtggggaaataaactgactttggactgcttcagtctctgccatcttccatgactgcatttgttcctgcctgcctcggcggtatccacagaagacaggcaagaggattggagcagttttctcacaggtctgcaattctgtttttctccaagtacattatgaccccctcatccttctcttgaactggagaggggaagaaatgaaaggcatgcccacgtccgtcacctccccatcccctagtccccaccttgaacatcatgagctgttgttattagtcttggaagcagagtctgggttggtgtggatagcaaaggaggaagtctgagcccctcattggtcttcctcccacctgtcccttttccgggaagttgtggaattgttggaagaagagtttgcagaaggttaggaatgggtagatagctaagtcctaatctatgggtacattgttgtgtcccaaaccaaaattttccttatccacaatgtcccttctgtctcttccactttacagtggactcggccactgtgcataggcttctctgctctccatcaaatcacttccactttcctgtgcccccacccccgcctccagttttccgctagtatccggcaaggtttcttgcaacaaatgattagttcttttcttctgactcgtggggctccctgctgcagagagcacagcccttgcctggagcccaggaaccccatccttgcttcatctcagttcttcatgggcttcactcttcccactcacggaagggaggtagctcagggacctccactgtgggacccttgagacgcttccactctgattcagaaacacacttctacctctttactgttaactcttaacagatgcagtcagcagtttctgggcacttctctcagtaggtgcctcatgctgacttctccagtagggtttcaggacaaactaccaaggaattgcctcagcctcctaccagtcctccctcacccaccttctgtctaggttcacttggtttgtcatcaggaactgagcaggtccaggactcagctttctgcttcagcctaagccagtactccttgtttgaggtaaaagccttaaaatttagctccctagctcttgattagaagcaatttggagtaagtgtgttttgatttaggcagggtagcttgggatacctttttaaaaacaccagatattaaaatgtctggcaaggttagaatcagactagatgatttgcttctaaaaattagtttcagtgagtcccagggactaattaaggtttattttaaaaagtgtctaccttggtacgcagccacctcctgcatgctgtgcatgttattgggacttgtattataggtgatggtatgtgagaatccagttgggactcgctgttgccatcctctttgttgtatctggttttcatcactagactcagcaacccttctcaccttaactgccaccttccctacactctcagtttacagaggccactgggcctctggctgcagaatacaaagtcccgggctgttagaggagtcctttcctctctgcctgccctttcctgtccctccctcgaattctctctccccgtaagtgatgctggaaaagtcataggactggcaaagcaactgtttaaaccctttgtaaccggggccttgcccccacctcctgtcttttctccttgccttccccactcctgtgtcctcccatctatcctgtctttcctttcctcctctcagtgtcctcagcacccacaaggaattttcctatcactgtgaactttgctggtacagaggaataatatctgccttcacctttttttttttggaccatagctagccagtcatttcttaaacctcccttcctaaaatctggggggtcggggggaaagaaaaaaaaagccttagtggcctggttgttcaaaggataagaatagctttatcctgcactcagtacccgaactcacttcagtatgcttactgaggccatgagaacctgaggggcatctgcccaggacaggagccatggcatatgacaaagaccaatgagggaccaggaaaaaaagtgatgtcccctttccctgccacctccagcctctgccagcaatgagctgtccccctcccaccctacacagtagctggtcagggctgagtacagtcctgggggtaaggggatgacatgcccaggtgtcagctcaaaggatctctgcatcatcttgaggtgggaggcagggaaaggagcgccaatgaggttccctgcaacccccgccctccagcccaccgcccaaccttttacaaatggcattttcttaattgaaaatccgggaagcaggtgtgattacttttttgctcgtagatattgtcctaagttggaattctcccactgccctaaaactttccctagtagtcctttaaactcccccctccctttttggtagctgttttctccgtcctctctccacctgccctcttatctaggagctgtttgtaagcacgatttttttaacaggttatattgtacaggatcaatattttgctttttaacaaggatatttatgtaataagaaactttgccttaggcaggtgttggccagaaaagtccagattcctctgggatcccaccctggcctctcctggaactctgaacctgctgtggaaggaattggccatgaccttcacctctggagagtagggtctatggcgagggaaaagggtgttcaccatgataacctagtgcctccatagaggggtttggaaaaattccagtccgatttctttgtgtgtcagctgacttccttagctgattgttcccacttgcacctctccacctttggcactagaactcctgagacaccacttctcatgcttctccctccctaccagcggtcaaggctttggagccactcttttgtaactccagattatttaaagagaaaagtacaagacagaaatcttctagcactttgtaaacacagtgaataacctcttggagtatttttggctttatataaaacaaggtttttaattgtaaagtataagtgccattagaaaatgcacagggcatatctttgttaaagtagatttttcaatgttttacagaattacattttcaaaaaaaggtttttataatgaagttgtttattaaaaacttctgaatgatg

SEQ ID NO: 5724 - protein, 496 aa, Homo sapiens
MTTFFTSVPPWIQDAKQEEEVGWKLVPRPRGREAESQVKCQCEISGTPFSNGEKLRPHSLPQPEQRPYSCPQLHCGKAFASKYKLYRHMATHSAQKPHQCMYCDKMFHRKDHLRNHLQTHDPNKEALHCSECGKNYNTKLGYRRHLAMHAASSGDLSCKVCLQTFESTQALLEHLKAHSRRVAGGAKEKKHPCDHCDRRFYTRKDVRRHLVVHTGRKDFLCQYCAQRFGRKDHLTRHVKKSHSQELLKIKTEPVDMLGLLSCSSTVSVKEELSPVLCMASRDVMGTKAFPGMLPMGMYGAHIPTMPSTGVPHSLVHNTLPMGMSYPLESSPISSPAQLPPKYQLGSTSYLPDKLPKVEVDSFLAELPGSLSLSSAEPQPASPQPAAAAALLDEALLAKSPANLSEALCAANVDFSHLLGFLPLNLPPCNPPGATGGLVMGYSQAEAQPLLTTLQAQPQDSPGAGGPLNFGPLHSLPPVFTSGLSSTTLPRFHQAFQ

SEQ ID NO: 5725 - DNA, 5218 bp, Homo sapiens
cttccctccccgactgtgcgccgcggctggctcgggttcccgggccgacatgggcgccgccgcgtgggcacggccgctgagcgtgtctttcctgctgctgcttctgccgctcccggggatgcctgcgggctcctgggacccggccggttacctgctctactgcccctgcatggggcgctttgggaaccaggccgatcacttcttgggctctctggcatttgcaaagctgctaaaccgtaccttggctgtccctccttggattgagtaccagcatcacaagcctcctttcaccaacctccatgtgtcctaccagaagtacttcaagctggagcccctccaggcttaccatcgggtcatcagcttggaggatttcatggagaagctggcacccacccactggccccctgagaagcgggtggcatactgctttgaggtggcagcccagcgaagcccagataagaagacgtgccccatgaaggaaggaaacccctttggcccattctgggatcagtttcatgtgagtttcaacaagtcggagctttttacaggcatttccttcagtgcttcctacagagaacaatggagccagagattttctccaaaggaacatccggtgcttgccctgccaggagccccagcccagttccccgtcctagaggaacacaggccactacagaagtacatggtatggtcagacgaaatggtgaagacgggagaggcccagattcatgcccaccttgtccggccctatgtgggcattcatctgcgcattggctctgactggaagaacgcctgtgccatgctgaaggacgggactgcaggctcgcacttcatggcctctccgcagtgtgtgggctacagccgcagcacagcggcccccctcacgatgactatgtgcctgcctgacctgaaggagatccagagggctgtgaagctctgggtgaggtcgctggatgcccagtcggtctacgttgctactgattccgagagttatgtgcctgagctccaacagctcttcaaagggaaggtgaaggtggtgagcctgaagcctgaggtggcccaggtcgacctgtacatcctcggccaagccgaccactttattggcaactgtgtctcctccttcactgcctttgtgaagcgggagcgggacctccaggggaggccgtcttctttcttcggcatggacaggccccctaagctgcgggacgagttctgattctggccggagcaccagaccctctgatcctggagggaccagagtctgagctggtccttccagccaggcctggcagccagaggtgctccgggattgcaaactcctcttctcacctgccaaagatggagaagagtgccagggacccctcaaggagggagacgctccatatcccagggcataggacttgcaggttcctaggagcaggagcatctcccatcgcacgtgctttctgctcttctgggaatttctcacactggcaaagcagtccagcctccgtcttctggtccactctgctctgagcagcctgggatgctgaactcttcagagagatttttttatagagagatttctataattttgatacaaggtcatgactatcctagaactctctgtggtttttgaaaatcattgaattctattaatgtaggtacctaaagtgaccttaactgaatgtggatgaggctggggctggtgtgggtcttttggctgcttttcaaggtgtcccccaatgtggccctcaagagccatccccactgcctggccagagccattgttgtcccctacttcctaggccatttctggggcttgggggatgaatgctgtcctgtgctgtaaacactatgcaaatggaagttatcggttgtggtgctgtgcagcgctctgtgggcgactaagtgccactcacgcagcatgttcctggcaaggagcacataccatcaagccacactatcatggtattgttctcacagtcttttggtggttgatggccactgcaaacctggcaccatcagatctcttctgatctcttgccccagtggggcctggttggtagaatgttggcattcggttgatatccaaagcctgttctcccagccgtcctcctgcagctggagccttcaggccgtattctcacgagggaacgtttgccaaggctctgacctcacagaagatgcccagggcccagaagccatcagaattatcagtggagaagcaccttttgactcttcccttccaatgtaatctctgccaacaccatgaggcttaaggtgctctaagtcatgagtgttttggtctcaaatgctgcagttttaataatctgtgactcctgagagcccatggttttttgaccttgtggttctaaaattccttgtctgacccctgtagatcttttccttgccatgtcacctcccttggcctttgatcctggaaaggtggcagagcctccactgagccaggcccagagctccttgcagtgccttcttccttgtttacctgtgggaggaaacactttttttgtcaggggcagcctggttcagagctcagaggtcacactgtatcaaagatctcaaacagcaaagtcagcatttgctgtatagagctgccacccaactctaagcaggagaaactgtacagaaagggctttgctatttttcccttttgggaaaacaatgaagtgttttaagtcctgggtggactgagagatggtttgcctgtccagacttgctctcaagcctcatccagagaaggagctgcagatgagggagcccgtacactccctgccaccactaggttgtaagcctgtagctggctggctgatttcattttggaattcatttgccatccacagccttacactaggcacacactttagagtctggggctccagtggggcccgcctaattttttttccccccaagacagggccttgctctgtctcccaggctggagtgcagtggcatgatcatggcttactgcagccttgatctcccaggctcaagcgatccttctgcctcagcctctctggtagctgagactgcatgcccagctccaaatcaccttgattcatatcagcagtaataatcacttgtgttctgaaagaaagggcaccagaagttctagcaaaattcagttgtgttctgtgagctagcactttttcctctgacccaattttcttacctataaaatggtgataaaaaccgacaggttgttcaaaggcccagatcagctaaagcatgtatataagagcacgttgtaaacttgaaagagacaaaggcacaaatgtggctgttgattaatttgactgcttctcgttgctcgtcacctccatgccaggcactgtgcttgctaattgctttatgggggcattctcttatttattccccagccctgggaaataggagctgtcattatccttctctttctgcacaaggaaaaattaatgccctgagaattgtcataattttcccaaggctgcccagctggtggtgttaagccagaatttgacctcccagagccagtttccattagctgccatgctctgctgcctctaattcacagaatgcactttctaccctgtgtgccatggagacctcctatggaaaaatgatcagccaccttaccttctactgggtacctgctgtgagtctgcctatgccagaaggattaaggaggggaggttacccaagaaacaaagcctacatgccgcttacagcccccgttggatggttgctcagtacaacagtcttgcattcagcaggtgtttgttcatcacctactatgtgtcaggctctatgctaggtactggggatacaggagagaatcaagcgtaaagtctttgttctcaaggaatttgcattctagaaagtagaagatgtaataaatgtactgtgggacatgttaataagtgctataaagaaatataaagggtttgggagcaaaaagagggagtggatctattttagatgagcccaggtaagacctctctgaagagctgtcatgaaggagggagggagcacattcctggcagagaaaacagcacgtgcaaaggccccgagactggagtgtgttcctgaagagcagccaggaggccagcatggctggagaggcaggcataggcagggaaccgagcagcaggtcagagcaggcgagctgacattctgcagcctggacggccatggcaggaagcttttagttggagagatacaggaagcctcctagggttctgagcagaagaggggcatgagctgattcacattctgaaggacctctctagctggccagtgctgaggaggttggagagagaaagggtgaaagcagagagaccagtgcagggctgttaacagggttgcaggcgagagactggggtgctgggctcccctagactaggactccagtgccctcctctcccaagagacaaaggccattgcattgaaggaggtgggaaatgattagattctgaacatatgtaattatttttcagtctttttcaaagatacaaatatttacatagttttaatcatgtaatatatacaatttaatgtcctagtgttttacttaatagtgtatcatgttttccctgttggtatgtagcctggataaatgctcttaattataaaaaattctgtcgaggagtgttccatagtttattgttttcctattatgagaatttaggccaagtgtggtggctcatgcctgtaatcccagcactttgcgaggccgaggtgggcagatcacttgaggtgaggagttcaagaccagcctggccaacatggtgaattatctctactaaaaatacaaaaaaataataataatagccaggcgtggtggcacatgcctgtattcccagctgcttgggaggctgaggcaggagaatggcttgaacctgggaggtggaggttgcagtgagccgagatggtgccactgcattccagcctgggcaacagagcgagactccatctcaaaaaaaaggagacttcatgtgcccccaatttttcactattgttatttgaaaaaatatttttatttgtaagagtttttctttatttaaaatgttcattaataaagttgttggacgggaagcaaaaaaaaaaagttgtttaagataaattcccagaagtgaatttgttagatcaaacacttaaaactttttgttatggaagaattcaaatataaataaaaaattgtgagtaataaaatgaactcacagtttcaacaatgacccac

SEQ ID NO: 5726 - protein, 388 aa, Homo sapiens
MGAAAWARPLSVSFLLLLLPLPGMPAGSWDPAGYLLYCPCMGRFGNQADHFLGSLAFAKLLNRTLAVPPWIEYQHHKPPFTNLHVSYQKYFKLEPLQAYHRVISLEDFMEKLAPTHWPPEKRVAYCFEVAAQRSPDKKTCPMKEGNPFGPFWDQFHVSFNKSELFTGISFSASYREQWSQRFSPKEHPVLALPGAPAQFPVLEEHRPLQKYMVWSDEMVKTGEAQIHAHLVRPYVGIHLRIGSDWKNACAMLKDGTAGSHFMASPQCVGYSRSTAAPLTMTMCLPDLKEIQRAVKLWVRSLDAQSVYVATDSESYVPELQQLFKGKVKVVSLKPEVAQVDLYILGQADHFIGNCVSSFTAFVKRERDLQGRPSSFFGMDRPPKLRDEF

SEQ ID NO: 5727 - DNA, 4335 bp, Homo sapiens
acccactcccgctgccccgtccggcccgcgccgcttcctcgcagcagctgctcccggctccgcggccgcagcccgcgtggacgctccgagcgccccccgacggacgggaccggctccctggcggtcgggcgagcgggcggcaacgctgcccggccggcagcgctggggttaagtggcccaagtaaacctagctcggcgatcggcgccggagattcgcgagcccagcgccctgcacggccgccagccggcctcccgccagccagccccgacccgcggctccgccgcccagccgcgccccagccagccctgcggcaggaaagcatgaagggagacaccaggcatctcaatggagaggaggacgccggcgggagggaagactcgatcctcgtcaacggggcctgcagcgaccagtcctccgactcgcccccaatcctggaggctatccgcaccccggagatcagaggccgaagatcaagctcgcgactctccaagagggaggtgtccagtctgctaagctacacacaggacttgacaggcgatggcgacggggaagatggggatggctctgacaccccagtcatgccaaagctcttccgggaaaccaggactcgttcagaaagcccagctgtccgaactcgaaataacaacagtgtctccagccgggagaggcacaggccttccccacgttccacccgaggccggcagggccgcaaccatgtggacgagtcccccgtggagttcccggctaccaggtccctgagacggcgggcaacagcatcggcaggaacgccatggccgtcccctcccagctcttaccttaccatcgacctcacagacgacacagaggacacacatgggacgccccagagcagcagtaccccctacgcccgcctagcccaggacagccagcaggggggcatggagtccccgcaggtggaggcagacagtggagatggagacagttcagagtatcaggatgggaaggagtttggaataggggacctcgtgtggggaaagatcaagggcttctcctggtggcccgccatggtggtgtcttggaaggccacctccaagcgacaggctatgtctggcatgcggtgggtccagtggtttggcgatggcaagttctccgaggtctctgcagacaaactggtggcactggggctgttcagccagcactttaatttggccaccttcaataagctcgtctcctatcgaaaagccatgtaccatgctctggagaaagctagggtgcgagctggcaagaccttccccagcagccctggagactcattggaggaccagctgaagcccatgttggagtgggcccacgggggcttcaagcccactgggatcgagggcctcaaacccaacaacacgcaaccagtggttaataagtcgaaggtgcgtcgtgcaggcagtaggaaattagaatcaaggaaatacgagaacaagactcgaagacgcacagctgacgactcagccacctctgactactgccccgcacccaagcgcctcaagacaaattgctataacaacggcaaagaccgaggggatgaagatcagagccgagaacaaatggcttcagatgttgccaacaacaagagcagcctggaagatggctgtttgtcttgtggcaggaaaaaccccgtgtccttccaccctctctttgagggggggctctgtcagacatgccgggatcgcttccttgagctgttttacatgtatgatgacgatggctatcagtcttactgcactgtgtgctgcgagggccgagagctgctgctttgcagcaacacgagctgctgccggtgtttctgtgtggagtgcctggaggtgctggtgggcacaggcacagcggccgaggccaagcttcaggagccctggagctgttacatgtgtctcccgcagcgctgtcatggcgtcctgcggcgccggaaggactggaacgtgcgcctgcaggccttcttcaccagtgacacggggcttgaatatgaagcccccaagctgtaccctgccattcccgcagcccgaaggcggcccattcgagtcctgtcattgtttgatggcatcgcgacaggctacctagtcctcaaagagttgggcataaaggtaggaaagtacgtcgcttctgaagtgtgtgaggagtccattgctgttggaaccgtgaagcacgaggggaatatcaaatacgtgaacgacgtgaggaacatcacaaagaaaaatattgaagaatggggcccatttgacttggtgattggcggaagcccatgcaacgatctctcaaatgtgaatccagccaggaaaggcctgtatgagggtacaggccggctcttcttcgaattttaccacctgctgaattactcacgccccaaggagggtgatgaccggccgttcttctggatgtttgagaatgttgtagccatgaaggttggcgacaagagggacatctcacggttcctggagtgtaatccagtgatgattgatgccatcaaagtttctgctgctcacagggcccgatacttctggggcaacctacccgggatgaacaggcccgtgatagcatcaaagaatgataaactcgagctgcaggactgcttggaatacaataggatagccaagttaaagaaagtacagacaataaccaccaagtcgaactcgatcaaacaggggaaaaaccaacttttccctgttgtcatgaatggcaaagaagatgttttgtggtgcactgagctcgaaaggatctttggctttcctgtgcactacacagacgtgtccaacatgggccgtggtgcccgccagaagctgctgggaaggtcctggagcgtgcctgtcatccgacacctcttcgcccctctgaaggactactttgcatgtgaatagttccagccaggccccaagcccactggggtgtgtggcagagccaggacccaggaggtgtgattcctgaaggcatccccaggccctgctcttcctcagctgtgtgggtcataccgtgtacctcagttccctcttgctcagtgggggcagagccacctgactcttgcaggggtagcctgaggtgccgcctccttgtgcacaaatcagacctggctgcttggagcagcctaacacggtgctcattttttcttctcctaaaactttaaaacttgaagtaggtagcaacgtggctttttttttttcccttcctgggtctaccactcagagaaacaatggctaagataccaaaaccacagtgccgacagctctccaatactcaggttaatgctgaaaaatcatccaagacagttattgcaagagtttaatttttgaaaactggctactgctctgtgtttacagacgtgtgcagttgtaggcatgtagctacaggacatttttaagggcccaggatcgttttttcccagggcaagcagaagagaaaatgttgtatatgtcttttacccggcacattccccttgcctaaatacaagggctggagtctgcacgggacctattagagtattttccacaatgatgatgatttcagcagggatgacgtcatcatcacattcagggctattttttcccccacaaacccaagggcaggggccactcttagctaaatccctccccgtgactgcaatagaaccctctggggagctcaggaaggggtgtgctgagttctataatataagctgccatatattttgtagacaagtatggctcctccatatctccctcttccctaggagaggagtgtgaagcaaggagcttagataagacaccccctcaaacccattccctctccaggagacctaccctccacaggcacaggtccccagatgagaagtctgctaccctcatttctcatctttttactaaactcagaggcagtgacagcagtcagggacagacatacatttctcataccttccccacatctgagagatgacagggaaaactgcaaagctcggtgctccctttggagattttttaatccttttttattccataagaagtcgtttttagggagaacgggaattcagacaagctgcatttcagaaatgctgtcataatggtttttaacaccttttactcttcttactggtgctattttgtagaataaggaacaacgttgacaagttttgtggggctttttatacactttttaaaatctcaaacttctatttttatgtttaacgttttcattaaaattttttttgtaactggagccacgacgtaacaaatatggggaaaaaactgtgccttgtttcaacagtttttgctaatttttaggctgaaagatgacggatgcctagagtttaccttatgtttaattaaaatcagtatttgtct

SEQ ID NO: 5728 - DNA, 2546 bp, Homo sapiens
acgagacgaagacggaaccggagccggttgcgggcagtggacgcggttctgccgagagccgaagatggcagtgaacgtatactcaacgtcagtgaccagtgataacctaagtcgacatgacatgctggcctggatcaatgagtctctgcagttgaatctgacaaagatcgaacagttgtgctcaggggctgcgtattgtcagtttatggacatgctgttccctggctccattgccttgaagaaagtgaaattccaagctaagctagaacacgagtacatccagaacttcaaaatactacaagcaggttttaagagaatgggtgttgacaaaataattcctgtggacaaattagtaaaaggaaagtttcaggacaattttgaattcgttcagtggttcaagaagtttttcgatgcaaactatgatggaaaagactatgaccctgtggctgccagacaaggtcaagaaactgcagtggctccttcccttgttgctccagctctgaataaaccgaagaaacctctcacttctagcagtgcagctccccagaggcccatctcaacacagagaaccgctgcggctcctaaggctggccctggtgtggtgcgaaagaaccctggtgtgggcaacggagacgacgaggcagctgagttgatgcagcaggtcaacgtattgaaacttactgttgaagacttggagaaagagagggatttctacttcggaaagctacggaacattgaattgatttgccaggagaacgagggggaaaacgaccctgtattgcagaggattgtagacattctgtatgccacagatgaaggctttgtgatacctgatgaagggggcccacaggaggagcaagaagagtattaacagcctggaccagcagagcaacatcggaattcttcactccaaatcatgtgcttaactgtaaaatactcccttttgttatccttagaggactcactggtttcttttcataagcaaaaagtacctcttcttaaagtgcactttgcagacgtttcactccttttccaataagtttgagttaggagcttttaccttgtagcagagcagtattaacacctagttggttcacctggaaaacagagaggctgaccgtggggctcaccatgcggatgcgggtcacactgaatgctggagagatgttatgtaatatgctgaggtggcgacctcagtggagaaatgtaaagactgaattgaattttaagctaatgtgaaatcagagaatgttgtaataagtaaatgccttaagagtatttaaaatatgcttccacatttcaaaatataaaatgtaacatgacaagagattttgcgtttgacattgtgtctgggaaggaagggccagaccttggaacctttggaacctgctgtcaacaggtcttacagggctgcttgaaccctcataggcctaggctttggtctaaaaggaacatttaaaaagttgccctgtaaagttatttggtgtcattgaccaattgcatcccagctaaaaagcaagaggcatcgttgcctggataatagaggatgtgtttcagccctgagatgttacagttgaagagcttggttttcattgagcatttctctatttttccagttatccccgaaatttctatgtattatattttttggggaagtgaggtgtgcccagttttttaatctaacaactacttttggggacttgcccacatctctgggatttgaatggggattgtatcccattttactgtcttttaggtttacatttaccacgtttctcttctctgctccccttgcccactggggactcctctttggctccttgaagtttgctgcttagagttggaagtgcagcaggcaggtgatcatgctgcaagttctttctggacctctggcaaagggagtggtcagtgaaggccatcgttaccttgggatctgccaggctggggtgttttcggtatctgctgttcacagctctccactgtaatccgaatactttgccagtgcactaatctctttggagataaaattcattagtgtgttactaaatgttaattttcttttgcggaaaatacagtaccgtgtctgaattaattattaatatttaaaatacttcattccttaactctccctcatttgctttgcccacagcctattcagttcctttgtttggcaggattctgcaaaatgtgtctcacccactactgagattgttcagcccctgatgtatttgtattgatttgtttctggtggtagcttgtcctgaaatgtgtgtagaaagcaagtattttatgataaaaatgttgtgtagtgcatgctctgtgtggaattcagaggaaaacccagattcagtgattaacaatgccaaaaaatgcaagtaactagccattgttcaaatgacagtggtgctatttctcttttgtggccttttagacttttgttgccctaaaattccattttattgggaacccattttccacctggtctttcttgacagggtttttttctactttaaacagtttctaaataaaattctgtatttcaagag

SEQ ID NO: 5729 - DNA, 1684 bp, Homo sapiens
agagaggagcgggccgaggactccagcgtgcccaggtctggcatcctgcacttgctgccctctgacacctgggaagatggccggcccgtggaccttcacccttctctgtggtttgctggcagccaccttgatccaagccaccctcagtcccactgcagttctcatcctcggcccaaaagtcatcaaagaaaagctgacacaggagctgaaggaccacaacgccaccagcatcctgcagcagctgccgctgctcagtgccatgcgggaaaagccagccggaggcatccctgtgctgggcagcctggtgaacaccgtcctgaagcacgtcatctggctgaaggtcatcacagctaacatcctccagctgcaggtgaagccctcggccaatgaccaggagctgctagtcaagatccccctggacatggtggctggattcaacacgcccctggtcaagaccatcgtggagttccacatgacgactgaggcccaagccaccatccgcatggacaccagtgcaagtggccccacccgcctggtcctcagtgactgtgccaccagccatgggagcctgcgcatccaactgctgcataagctctccttcctggtgaacgccttagctaagcaggtcatgaacctcctagtgccatccctgcccaatctagtgaaaaaccagctgtgtcccgtgatcgaggcttccttcaatggcatgtatgcagacctcctgcagctggtgaaggtgcccatttccctcagcattgaccgtctggagtttgaccttctgtatcctgccatcaagggtgacaccattcagctctacctgggggccaagttgttggactcacagggaaaggtgaccaagtggttcaataactctgcagcttccctgacaatgcccaccctggacaacatcccgttcagcctcatcgtgagtcaggacgtggtgaaagctgcagtggctgctgtgctctctccagaagaattcatggtcctgttggactctgtgcttcctgagagtgcccatcggctgaagtcaagcatcgggctgatcaatgaaaaggctgcagataagctgggatctacccagatcgtgaagatcctaactcaggacactcccgagttttttatagaccaaggccatgccaaggtggcccaactgatcgtgctggaagtgtttccctccagtgaagccctccgccctttgttcaccctgggcatcgaagccagctcggaagctcagttttacaccaaaggtgaccaacttatactcaacttgaataacatcagctctgatcggatccagctgatgaactctgggattggctggttccaacctgatgttctgaaaaacatcatcactgagatcatccactccatcctgctgccgaaccagaatggcaaattaagatctggggtcccagtgtcattggtgaaggccttgggattcgaggcagctgagtcctcactgagcaaggatgcccttgtgcttactccagcctccttgtggaaacccacctctcctgtctcccagtgaagacttggatggcagccatcagggaaggctgggtcccagctgggagtatgggtgtgagctctatagaccatccctctctgcaatcaataaacacttgcctgtgaaaaaaaaaaaaaaaaaagaaaaaaaaaaaaaaaaaaaaaaaaaaaaaaa

SEQ ID NO: 5730 - protein, 484 aa, Homo sapiens
MAGPWTFTLLCGLLAATLIQATLSPTAVLILGPKVIKEKLTQELKDHNATSILQQLPLLSAMREKPAGGIPVLGSLVNTVLKHVIWLKVITANILQLQVKPSANDQELLVKIPLDMVAGFNTPLVKTIVEFHMTTEAQATIRMDTSASGPTRLVLSDCATSHGSLRIQLLHKLSFLVNALAKQVMNLLVPSLPNLVKNQLCPVIEASFNGMYADLLQLVKVPISLSIDRLEFDLLYPAIKGDTIQLYLGAKLLDSQGKVTKWFNNSAASLTMPTLDNIPFSLIVSQDVVKAAVAAVLSPEEFMVLLDSVLPESAHRLKSSIGLINEKAADKLGSTQIVKILTQDTPEFFIDQGHAKVAQLIVLEVFPSSEALRPLFTLGIEASSEAQFYTKGDQLILNLNNISSDRIQLMNSGIGWFQPDVLKNIITEIIHSILLPNQNGKLRSGVPVSLVKALGFEAAESSLSKDALVLTPASLWKPTSPVSQ

SEQ ID NO: 5731 - DNA, 1538 bp, Homo sapiens
ccctgctggggcatccccggcctgtgatgctccccgtctccccagaaccgctgttgtcccggatgggcagcctgcgggctcccgtggacgaggaccgcctgtccccgctggtggcggccgactcgctcctggagcatgtgcgggaggacttctccggcctcctccctgaggagttcatcagcctttccccaccccacgaggccctcgactaccacttcggcctcgaggagggcgagggcatcagagacctcttcgactgtgactttggggacctcacccccctggatttctgacagggcttggagggaccagggtttccagagatgctcaccttgtctctgcagccctggagccccctgtccctggccgtcctcccagcctgtttggaaacatttaatttatacccctctcctctgtctccagaagcttctagctctggggtctggctaccgctaggaggctgagcaagccaggaagggaaggagtctgtgtggtgtgtatgtgcatgcagcctacacccacacgtgtgtaccgggggtgaatgtgtgtgagcatgtgtgtgtgcatgtaccggggaatgaaggtgaacatacacctctgtgtgtgcactgcagacacgccccagtgtgtccacatgtgtgtgcatgagtccatgtgtgcgcgtgggggggctctaactgcactttcggcccttttgctctgggggtcccacaaggcccagggcagtgcctgctcccagaatctggtgctctgaccaggccaggtggggaggctttggctggctgggcgtgtaggacggtgagagcacttctgtcttaaaggttttttctgattgaagctttaatggagcgttatttatttatcgaggcctctttggtgagcctggggaatcagcaaaggggaggaggggtgtggggttgataccccaactccctctacccttgagcaagggcaggggtccctgagctgttcttctgccccatactgaaggaactgaggcctgggtgatttatttattgggaaagtgagggagggagacagactgactgacagccatgggtggtcagatggtggggtgggccctctccagggggccagttcagggccccagctgccccccaggatggatatgagatgggagaggtgagtgggggaccttcactgatgtgggcaggaggggtggtgaaggcctcccccagcccagaccctgtggtccctcctgcagtgtctgaagcgcctgcctccccactgctctgccccaccctccaatctgcactttgatttgcttcctaacagctctgttccctcctgctttggttttaataaatattttgatgacgtttgggccgggttttgggactctgttgggaacatttcggggcgggagaggccaaggttgctggggaaatgcccattctccacttcccttctccctgtccgtgcccgatttgatttgagcctcataactcgaagaaaggtcagcttcctcgctgttttggtcctaactcaaaagcagatccagtaaaggtttttgttgt

SEQ ID NO: 5732 - protein, 437 aa, Homo sapiens
MALAGAPAGGPCAPALEALLGAGALRLLDSSQIVIISAAQDASAPPAPTGPAAPAAGPCDPDLLLFATPQAPRPTPSAPRPALGRPPVKRRLDLETDHQYLAESSGPARGRGRHPGKGVKSPGEKSRYETSLNLTTKRFLELLSHSADGVVDLNWAAEVLKVQKRRIYDITNVLEGIQLIAKKSKNHIQWLGSHTTVGVGGRLEGLTQDLRQLQESEQQLDHLMNICTTQLRLLSEDTDSQRLAYVTCQDLRSIADPAEQMVMVIKAPPETQLQAVDSSENFQISLKSKQGPIDVFLCPEETVGGISPGKTPSQEVTSEEENRATDSATIVSPPPSSPPSSLTTDPSQSLLSLEQEPLLSRMGSLRAPVDEDRLSPLVAADSLLEHVREDFSGLLPEEFISLSPPHEALDYHFGLEEGEGIRDLFDCDFGDLTPLDF

SEQ ID NO: 5733 - DNA, 1589 bp, Homo sapiens
cgcgcgagcggcgccagctcggggcagcggaacccagagaagctgagggggcggtagcggcggcgacggcgacgacgacgactcccgcgcgtgtgcccagcctcttcccgccgcagccgcccttttcctccctcccttacgtccccgagtgcggcagtaccgcctccttcccagccgcgcggcttcctccagacctctcggcgcgggtgagccctattcccagaggcaggtggtgctgaccctgtaacccaaaggaggaaacagctggctaagctcatcattgttactggtgggcaccatgtccttgaagcttcaggcaagcaatgtaaccaacaagaatgaccccaagtccatcaactctcgagtcttcattggaaacctcaacacagctctggtgaagaaatcagatgtggagaccatcttctctaagtatggccgtgtggccggctgttctgtgcacaagggctatgcctttgttcagtactccaatgagcgccatgcccgggcagctgtgctgggagagaatgggcgggtgctggccgggcagaccctggacatcaacatggctggagagcctaagcctgacagacccaaggggctaaagagagcagcatctgccatatacagtggctacatctttgactatgattactaccgggacgacttctacgacaggctcttcgactaccggggccgtctgtcgcccgtgccagtgcccagggcggtccctgtgaagcgaccccgggtcacagtccctttggtccggcgtgtcaaaactaacgtacctgtcaagctctttgcccgctccacagctgtcaccaccagctcagccaagatcaagttaaagagcagtgagctgcaggccatcaagacggagctgacacagatcaagtccaatatcgatgccctgctgagccgcttggagcagatcgctgcggagcaaaaggccaatccagatggcaagaagaagggtgatggaggtggcgccggcggcggcggcggtggtggtggcagcggtggcggtggcagtggtggtggcggtggcggtggcagcagccggccaccagccccccaagagaacacaacttctgaggcaggcctgccccagggggaagcacggacccgagacgacggcgatgaggaagggctcctgacacacagcgaggaagagctggaacacagccaggacacagacgcggatgatggggccttgcagtaagcagcctgacaggagcaatggccaccagcaggtgaagggcatcgctgccccaggcctcaagccgggcacccaaccctggatgccaccccccagcgggtaccagaggaaagctggcagcaggcgcctcctcccccaacgcatcccagccagtgccatgtcctctgcaggtggagttactggcctactccttccccatgagccctccctgtctgcactgcccaggccagagggtagagcacaggggtttccccatactacctcccctccccaggacactcccaggcttgggttttttctataggtttggcggggggccacagggaggggaccctgacaataaagagattggatcccaaaaaaaaaaaaaaaa

SEQ ID NO: 5734 - DNA, 1416 bp, Homo sapiens
cgttgaagacattgtcgggtggtgggagaggtatcggcaggggcagcgctgccgccggggcctggggctgacccgtctgacttcccgtccgtgccgagcccactcgagccgcagccatgtctggggacgagatgatttttgatcctactatgagcaagaagaaaaagaagaagaagaagccttttatgttagatgaggaaggggatacccaaacagaggaaacccagccttcagaaacaaaagaagtggagccagagccaactgaggacaaggatttggaagctgatgaagaggacactaggaaaaaagatgcttctgatgatctagatgacttgaacttctttaatcaaaagaaaaagaagaaaaaaactaaaaagatatttgatattgatgaagctgaagaaggtgtaaaggatcttaagattgaaagtgatgttcaagaaccaactgaaccagaggatgaccttgacattatgcttggcaataaaaagaagaaaaagaagaatgttaagttcccagatgaggatgaaatactagagaaagatgaagctctagaagatgaagacaacaaaaaagatgatggtatctcattcagtaatcagacaggccctgcttgggcaggctcagaaagagactacacatacgaggagctgctgaatcgagtgttcaacatcatgagggaaaagaatccagatatggttgctggggagaaaaggaaatttgtcatgaaacctccacaagtcgtccgagtaggaaccaagaaaacttcttttgtcaactttacagatatctgtaaactattacatcgtcagcccaaacatctccttgcatttttgttggctgaattgggtacaagtggttctatagatggtaataaccaacttgtaatcaaaggaagattccaacagaaacagatagaaaatgtcttgagaagatatatcaaggaatatgtcacttgtcacacatgccgatcaccggacacaatcctgcagaaggacatacgactctatttcctacagtgcgaaacttgtcattctagatgttctgttgccagtatcaaaaccggcttccaggctgtcacgggcaagcgagcacagctccgtgccaaagctaactaatttgctaatcactgattttgcaaagcttgttgtggagatgtggctggacaggtttgccatcagagtggatataccgttgtattaaaaacaagataaaaaagctgccaagatttttggcgagtggttggtctgaagtccttgcaagacgctgatgctcaagctgttgacatactcattgcctactttaacacctgtcagagaaacgtgatatggggtaaggaggtgcttttttaaaatcgttcatagacttctgtaaaatgcaagataaattaaagttattataacagtgattctttca

SEQ ID NO: 5735 - protein, 333 aa, Homo sapiens [sequence omitted]

SEQ ID NO: 5736 - DNA, 2110 bp, Homo sapiens
ctgaggcccagcccccttcgcccgtttccatcacgagtgccgccagcatgtctgacaaactgccctacaaagtcgccgacatcggcctggctgcctggggacgcaaggccctggacattgctgagaacgagatgccgggcctgatgcgtatgcgggagcggtactcggcctccaagccactgaagggcgcccgcatcgctggctgcctgcacatgaccgtggagacggccgtcctcattgagaccctcgtcaccctgggtgctgaggtgcagtggtccagctgcaacatcttctccacccaggaccatgcggcggctgccattgccaaggctggcattccggtgtatgcctggaagggcgaaacggacgaggagtacctgtggtgcattgagcagaccctgtacttcaaggacgggcccctcaacatgattctggacgacgggggcgacctcaccaacctcatccacaccaagtacccgcagcttctgccaggcatccgaggcatctctgaggagaccacgactggggtccacaacctctacaagatgatggccaatgggatcctcaaggtgcctgccatcaatgtcaatgactccgtcaccaagagcaagtttgacaacctctatggctgccgggagtccctcatagatggcatcaagcgggccacagatgtgatgattgccggcaaggtagcggtggtagcaggctatggtgatgtgggcaagggctgtgcccaggccctgcggggtttcggagcccgcgtcatcatcaccgagattgaccccatcaacgcactgcaggctgccatggagggctatgaggtgaccaccatggatgaggcctgtcaggagggcaacatctttgtcaccaccacaggctgtattgacatcatccttggccggcactttgagcagatgaaggatgatgccattgtgtgtaacattggacactttgacgtggagatcgatgtcaagtggctcaacgagaacgccgtggagaaggtgaacatcaagccgcaggtggaccggtatcggttgaagaatgggcgccgcatcatcctgctggccgagggtcggctggtcaacctgggttgtgccatgggccaccccagcttcgtgatgagtaactccttcaccaaccaggtgatggcgcagatcgagctgtggacccatccagacaagtaccccgttggggttcatttcctgcccaagaagctggatgaggcagtggctgaagcccacctgggcaagctgaatgtgaagttgaccaagctaactgagaagcaagcccagtacctgggcatgtcctgtgatggccccttcaagccggatcactaccgctactgagagccaggtctgcgtttcaccctccagctgctgtccttgcccaggccccacctctcctccctaagagctaatggcaccaactttgtgactggtttgtcagtgtcccccatcgactctctggggctgatcacttagtttttggcctctgctgcagccgtcatactgttccaaatgtggcagcgggaacagagtaccctcttcaagccccggtcatgatggaggtcccagccacagggaaccatgagctcagtggtcttggaacagctcactaagtcagtccttccttagcctggaagccagtagtggagtcacaaagcccatgtgttttgccatctaggccttcacctggtctgtggacttatacctgtgtgcttggtttacaggtccagtggttcttcagcccatgacagatgagaaggggctatattgaagggcaaagaggaactgttgtttgaattttcctgagagcctggcttagtgctgggccttctcttaaacctcattacaatgaggttagtacttttagtccctgttttacaggggttagaatagactgttaaggggcaactgagaaagaacagagaagtgacagctaggggttgagaggggccagaaaaacatgaatgcaggcagatttcgtgaaatctgccaccactttataaccagatggttcctttcacaaccctgggtcaaaaagagaataatttggcctataatgttaaaagaaagcaggaaggtgggtaaataaaaatcttggtgcctgg

SEQ ID NO: 5737 - protein, 432 aa, Homo sapiens
MSDKLPYKVADIGLAAWGRKALDIAENEMPGLMRMRERYSASKPLKGARIAGCLHMTVETAVLIETLVTLGAEVQWSSCNIFSTQDHAAAAIAKAGIPVYAWKGETDEEYLWCIEQTLYFKDGPLNMILDDGGDLTNLIHTKYPQLLPGIRGISEETTTGVHNLYKMMANGILKVPAINVNDSVTKSKFDNLYGCRESLIDGIKRATDVMIAGKVAVVAGYGDVGKGCAQALRGFGARVIITEIDPINALQAAMEGYEVTTMDEACQEGNIFVTTTGCIDIILGRHFEQMKDDAIVCNIGHFDVEIDVKWLNENAVEKVNIKPQVDRYRLKNGRRIILLAEGRLVNLGCAMGHPSFVMSNSFTNQVMAQIELWTHPDKYPVGVHFLPKKLDEAVAEAHLGKLNVKLTKLTEKQAQYLGMSCDGPFKPDHYRY

SEQ ID NO: 5738 - DNA, 1856 bp, Homo sapiens
gggagaaccgttcgcggaggaaaggcgaactagtgttgggatggccaccaactgggggagcctcttgcaggataaacagcagctagaggagctggcacggcaggccgtggaccgggccctggctgagggagtattgctgaggacctcacaggagcccacttcctcggaggtggtgagctatgccccattcacgctcttcccctcactggtccccagtgccctgctggagcaagcctatgctgtgcagatggacttcaacctgctagtggatgctgtcagccagaacgctgccttcctggagcaaactctttccagcaccatcaaacaggatgactttaccgctcgtctctttgacatccacaagcaagtcctaaaagagggcattgcccagactgtgttcctgggcctgaatcgctcagactacatgttccagcgcagcgcagatggctccccagccctgaaacagatcgaaatcaacaccatctctgccagctttgggggcctggcctcccggaccccagctgtgcaccgacatgttctcagtgtcctgagtaagaccaaagaagctggcaagatcctctctaataatcccagcaagggactggccctgggaattgccaaagcctgggagctctacggctcacccaatgctctggtgctactgattgctcaagagaaggaaagaaacatatttgaccagcgtgccatagagaatgagctactggccaggaacatccatgtgatccgacgaacatttgaagatatctctgaaaaggggtctctggaccaagaccgaaggctgtttgtggatggccaggaaattgctgtggtttacttccgggatggctacatgcctcgtcagtacagtctacagaattgggaagcacgtctactgctggagaggtcacatgctgccaagtgcccagacattgccacccagctggctgggactaagaaggtgcagcaggagctaagcaggccgggcatgctggagatgttgctccctggccagcctgaggctgtggcccgcctccgcgccacctttgctggcctctactcactggatgtgggtgaagaaggggaccaggccatcgccgaggcccttgctgcccctagccggtttgtgctaaagccccagagagagggtggaggtaacaacctatatggggaggaaatggtacaggccctgaaacagctgaaggacagtgaggagagggcctcctacatcctcatggagaagatcgaacctgagccttttgagaattgcctgctacggcctggcagccctgcccgagtggtccagtgcatttcagagctgggcatctttggggtctatgtcaggcaggaaaagacactcgtgatgaacaagcacgtggggcatctacttcgaaccaaagccatcgagcatgcagatggtggtgtggcagcgggagtggcagtcctggacaacccataccctgtgtgagggcacaaccaggccacgggaccttctatcctctgtatttgtcattcctctcctagccctcctgaggggtatcctcctaaagacctccaaagtttttatggaagggtaaatactggtaccttcccccagctttccatctgaggaccagaaaagttgtgtctcccttagatgagatctagacgcccccaaatccttgagatgtgggtatagctcagggtaagctgctctgaggtaaaggtccatgaaccctgccccactcctgtcagcccctcatcagccttttcagcaggttccagtgcctgacttgggataggactgagtggtaggaggagggggagtggaggggcatagcctttccctaattctgccttaaataaaactgcattgctgt

SEQ ID NO: 5739 - protein, 474 aa, Homo sapiens
MATNWGSLLQDKQQLEELARQAVDRALAEGVLLRTSQEPTSSEVVSYAPFTLFPSLVPSALLEQAYAVQMDFNLLVDAVSQNAAFLEQTLSSTIKQDDFTARLFDIHKQVLKEGIAQTVFLGLNRSDYMFQRSADGSPALKQIEINTISASFGGLASRTPAVHRHVLSVLSKTKEAGKILSNNPSKGLALGIAKAWELYGSPNALVLLIAQEKERNIFDQRAIENELLARNIHVIRRTFEDISEKGSLDQDRRLFVDGQEIAVVYFRDGYMPRQYSLQNWEARLLLERSHAAKCPDIATQLAGTKKVQQELSRPGMLEMLLPGQPEAVARLRATFAGLYSLDVGEEGDQAIAEALAAPSRFVLKPQREGGGNNLYGEEMVQALKQLKDSEERASYILMEKIEPEPFENCLLRPGSPARVVQCISELGIFGVYVRQEKTLVMNKHVGHLLRTKAIEHADGGVAAGVAVLDNPYPV

SEQ ID NO: 5740 - DNA, 1885 bp, Homo sapiens
ggaagaacccgcagcagctcccaggatgaactggttgcagtggctgctgctgctgcgggggcgctgagaggacacgagctctatgcctttccggctgctcatcccgctcggcctcctgtgcgcgctgctgcctcagcaccatggtgcgccaggtcccgacggctccgcgccagatcccgcccactacagggagcgagtcaaggccatgttctaccacgcctacgacagctacctggagaatgcctttcccttcgatgagctgcgacctctcacctgtgacgggcacgacacctggggcagtttctctctgactctaattgatgcactggacaccttgctgattttggggaatgtctcagaattccaaagagtggttgaagtgctccaggacagcgtggactttgatattgatgtgaacgcctctgtgtttgaaacaaacattcgagtggtaggaggactcctgtctgctcatctgctctccaagaaggctggggtggaagtagaggctggatggccctgttccgggcctctcctgagaatggctgaggaggcggcccgaaaactcctcccagcctttcagacccccactggcatgccatatggaacagtgaacttacttcatggcgtgaacccaggagagacccctgtcacctgtacggcagggattgggaccttcattgttgaatttgccaccctgagcagcctcactggtgacccggtgttcgaagatgtggccagagtggctttgatgcgcctctgggagagccggtcagatatcgggctggtcggcaaccacattgatgtgctcactggcaagtgggtggcccaggacgcaggcatcggggctggcgtggactcctactttgagtacttggtgaaaggagccatcctgcttcaggataagaagctcatggccatgttcctagagtataacaaagccatccggaactacacccgcttcgatgactggtacctgtgggttcagatgtacaaggggactgtgtccatgccagtcttccagtccttggaggcctactggcctggtcttcagagcctcattggagacattgacaatgccatgaggaccttcctcaactactacactgtatggaagcagtttggggggctcccggaattctacaacattcctcagggatacacagtggagaagcgagagggctacccacttcggccagaacttattgaaagcgcaatgtacctctaccgtgccacgggggatcccaccctcctagaactcggaagagatgctgtggaatccattgaaaaaatcagcaaggtggagtgcggatttgcaacaatcaaagatctgcgagaccacaagctggacaaccgcatggagtcgttcttcctggccgagactgtgaaatacctctacctcctgtttgacccaaccaacttcatccacaacaatgggtccaccttcgacacggtgatcaccccctatggggagtgcatcctgggggctggggggtacatcttcaacacagaagctcaccccatcgaccctgccgccctgcactgctgccagaggctgaaggaagagcagtgggaggtggaggacttgatgagggaattctactctctcaaacggtgcaggtcgaaatttcagaaaaacactgttagttcggggccatgggaacctccagcaaggccaggaacactcttctcaccagaaaaccatgaccaggcaagggagaggaagcctgccaaacagaaggtcccacttctcagctgccccagtcagcccttcacctccaagttggcattactgggacaggttttcctagactcctcataaccactggataatttttttatttttatttttttgaggctaaactataataaattgcttttggctatc

SEQ ID NO: 5741 - protein, 578 aa, Homo sapiens
MPFRLLIPLGLLCALLPQHHGAPGPDGSAPDPAHYRERVKAMFYHAYDSYLENAFPFDELRPLTCDGHDTWGSFSLTLIDALDTLLILGNVSEFQRVVEVLQDSVDFDIDVNASVFETNIRVVGGLLSAHLLSKKAGVEVEAGWPCSGPLLRMAEEAARKLLPAFQTPTGMPYGTVNLLHGVNPGETPVTCTAGIGTFIVEFATLSSLTGDPVFEDVARVALMRLWESRSDIGLVGNHIDVLTGKWVAQDAGIGAGVDSYFEYLVKGAILLQDKKLMAMFLEYNKAIRNYTRFDDWYLWVQMYKGTVSMPVFQSLEAYWPGLQSLIGDIDNAMRTFLNYYTVWKQFGGLPEFYNIPQGYTVEKREGYPLRPELIESAMYLYRATGDPTLLELGRDAVESIEKISKVECGFATIKDLRDHKLDNRMESFFLAETVKYLYLLFDPTNFIHNNGSTFDTVITPYGECILGAGGYIFNTEAHPIDPAALHCCQRLKEEQWEVEDLMREFYSLKRCRSKFQKNTVSSGPWEPPARPGTLFSPENHDQARERKPAKQKVPLLSCPSQPFTSKLALLGQVFLDSS

SEQ ID NO: 5742 - DNA, 1112 bp, Homo sapiens
gacggaaacctttttagggagtccaaggtacagtcgccgcgtgcgagcttgttactggttacttggcctcatggcggtccgagcttcgttcgagaacaactgtgagatcggctgctttgccaagctcaccaacacctactgtctggtagcgatcggaggctcagagaacttctacagtgtgttcgagggcgagctctccgataccatccccgtggtgcacgcgtctatcgccggctgccgcatcatcgggcgcatgtgtgtggggaacaggcacggtctcctggtacccaacaataccaccgaccaggagctgcaacacattcgcaacagcctcccagacacagtgcagattaggcgggtggaggagcggctctcagccttgggcaatgtcaccacctgcaatgactacgtggccttggtccacccagacttggacagggagacagaagaaattctggcagatgtgctcaaggtggaagtcttcagacagacagtggccgaccaggtgctagtaggaagctactgtgtcttcagcaatcagggagggctggtgcatcccaagacttcaattgaagaccaggatgagctgtcctctcttcttcaagtcccccttgtggcggggactgtgaaccgaggcagtgaggtgattgctgctgggatggtggtgaatgactggtgtgccttctgtggcctggacacaaccagcacagagctgtcagtggtggagagtgtcttcaagctgaatgaagcccagcctagcaccattgccaccagcatgcgggattccctcattgacagcctcacctgagtcaccttccaagttgttccatgggctcctggctctggactgtggccaaccttctccacattccgcccaatctgtaccggatgctggcagggaggtggcagagagctcactgggactgaggggctgggcacccaacccttttccacctgtgcttatcgcctggatctatcattactgcaaaaacctgctctgttgtgctggctggcaggccctgtggctgctggctgagggttctgctgtcctgtgccaccccattaaagtgcagttcctccggaaaaaaaaaaaaaaaaaaaaaaaaaaaaaa

SEQ ID NO: 5743 - protein, 245 aa, Homo sapiens
MAVRASFENNCEIGCFAKLTNTYCLVAIGGSENFYSVFEGELSDTIPVVHASIAGCRIIGRMCVGNRHGLLVPNNTTDQELQHIRNSLPDTVQIRRVEERLSALGNVTTCNDYVALVHPDLDRETEEILADVLKVEVFRQTVADQVLVGSYCVFSNQGGLVHPKTSIEDQDELSSLLQVPLVAGTVNRGSEVIAAGMVVNDWCAFCGLDTTSTELSVVESVFKLNEAQPSTIATSMRDSLIDSLT

SEQ ID NO: 5744 - DNA, 8365 bp, Homo sapiens
cgttcgggcagcggcctcttgttacccggggcccgcttgcctcagcttcttgctgccgccagcacgctaagctccagtcggcgccgaaggagagcttcccgaccctcgtgtccagtagccgcaatcccaggctgggagggtgaggcgccgcgctctgccgcccccccgcccctcgctccctgtgtcctggcggatttgcacgtaatctatccgaaagcccagtcccacccgccacccgactctggagctcccattcttcaggaccctgctgaagtatcgcttctcagccgccttctccaggcgcagctgcattcgcttctcggtttttgcactcgctgtgcaccgagttactttcccggcccctcgttgacaccgttcacaggtggctgttggtctttagtaagggtgctgtcttccctgtctgatccttagcaaaagtaggaaggtagagttgttggcagaaatcctgggataagagaatagtttcctggaagatctgtgcctccaaccagcagagagggattgagcttcattgaactcaacagagccaacatttcatagcaccatgttcaagaggaggttgaagtggcatggcaatggttagagaccctgctgggcgtgaacaccctctggctacctagggacctgtgggcctaccacctggtgccctcatggagacaagaagccctgggttgaacaacatgaagccccagtcactgcagctggtactggaagagcaggtgctggcactacagcagcagatggcagagaatcaggcagcctcctggcggaagctgaagaactcccaggaggcccagcagagacaagcaacccttgtgaggaagctgcaggccaaggtgctgcagtaccgaagctggtgccaagagctggagaagcggctagaagccactggaggaccaatcccccagaggtgggaaaatgtggaggagccaaacctggatgagctgctggtccgattggaggaggagcaacagaggtgtgagagtctagcagaggtgaacacccagcttcgactgcacatggaaaaagctgacgtggtgaataaagcccttagggaagatgtggaaaaactgacagtggactggagccgggcccgggatgagctaatgaggaaggagagccagtggcagatggagcaggagttcttcaagggctacctgaaaggggagcacggtcgccttctcagtctatggcgggaggttgtgacattccgacgccacttcctggaaatgaagtcagctactgacagagatctgatggagctaaaagctgagcatgtgaggctttcagggtctctgttgacctgttgtctgcgcttgactgtgggagcacagtctcgggaacccaacggatctggaagaatggatgggcgggagccggcccagctgctgctgctactagccaagacccaggagctggagaaggaagcccatgaaaggagccaggagttaatacagctgaagagtcaaggggatctggagaaggctgaacttcaggaccgggtgaccgagctctctgctctgttgacccagtctcagaagcaaaatgaagattatgaaaagatgataaaggctctgagagagacagtggagatcctggagacaaatcacacagaattaatggaacatgaagcatctcttagtaggaatgcgcaagaggagaagttgtctttacagcaggtgatcaaggatataacccaggtcatggtggaagaaggggacaatatagcccaaggctctggtcatgagaactctttggaattggactctagtatcttctcccagtttgattaccaggatgcagacaaggctcttactctggtgcgttcagtgctgactcggagacgccaggctgtgcaggacctaaggcagcagcttgcaggctgtcaagaggctgtgaacttgttgcaacagcagcatgatcagtgggaggaagagggcaaagccttgagacagcggctgcagaagctcactggggagcgggacactctggcagggcagactgtggacctccagggagaggtggactctctcagcaaggagcgagagctgctgcagaaggccagggaagagctgcggcagcagctggaggtgctagagcaggaggcatggcgcctgcgaagggtaaatgtggagcttcagctgcagggggactctgcccagggccagaaggaggaacagcaggaggagctgcacctggctgtccgggagagggagcgtcttcaggagatgctgatgggcctggaagccaaacagtcagaatcactcagtgaactgatcactcttcgggaagccctggagtcaagtcacctggaaggggagttactgaggcaagagcaaacggaagtgaccgcagcgctggctagggcagagcagtcaattgcagagctgtcgagttctgaaaacaccctgaagacagaagtagctgatcttcgggctgcagctgtcaagctcagtgccttaaatgaggctttggcgttagataaagttgggctgaaccagcagcttctccagttagaggaggagaaccagtctgtgtgcagcagaatggaggccgcagagcaggcgagaaatgctttgcaggtcgacctggcggaggcagagaagaggagggaagccctgtgggaaaagaacactcacctggaggctcagctgcagaaagctgaggaggctggggctgagctgcaggcagatctcagggacatccaagaagagaaggaagaaattcaaaagaaactaagtgagtcacgtcaccagcaggaggcagccacgactcagctggagcagctacatcaggaggcaaagcgacaggaagaagtgcttgccagggcagtccaggagaaggaggccctagtacgagagaaagcggctctagaggtgcggctgcaggccgtggagcgtgaccggcaggacctcgctgaacaactacaggggctcagctcagccaaggagctactggagagcagtctgtttgaagcccaacaacaaaattctgtgatagaggtcaccaaggggcagctggaggtccagattcaaactgtcactcaagccaaggaagtaatccaaggggaagtgaggtgcctgaagctggaactggacactgaacggagtcaggcagagcaggagcgggatgctgcagccagacagctggcccaggctgagcaagaagggaagactgccttggagcagcagaaggcagcccatgagaaagaggtgaaccagctccgggagaaatgggagaaggagcgctcctggcaccagcaggagctggcaaaggctctggagagcttagaaagggaaaaaatggagctggaaatgaggctaaaggagcagcagacagaaatggaggccatccaggcccagagggaagaagaacggacccaggcagagagtgccctatgccagatgcagctggaaacagagaaggagagagtatccctcctggagacactgctgcagacgcagaaggagctagcagatgccagccaacaactggaacgactgaggcaggacatgaaagtccagaaattaaaggagcaggagaccactgggatactacagacccagctccaggaggctcaacgggagctgaaggaggcagcccggcagcacagagatgaccttgctgccctccaagaagagagcagctccctgctgcaggataagatggacctgcagaagcaggtggaggacttgaagtctcagctggtggcccaggatgactcccagaggctggtggagcaggaggttcaggagaagctgagagagacccaggagtataaccgaattcagaaggagctggagagagagaaagccagcctgactctgtcactgatggaaaaggaacagagactccttgttttacaagaagctgactctattcgacaacaagagctgagtgccctgcgccaggacatgcaggaggcccagggagaacagaaagagctcagtgctcagatggaattactaaggcaagaggtgaaggaaaaggaggctgactttctggcccaggaagcacagctgctggaggagctggaggcgtctcatatcacggagcagcagctgcgagcctccttgtgggcccaggaagccaaggcagcccaactacagctgcgactgcgcagcacagagagccagctagaagcgctggccgcagagcagcagcccgggaaccaggcccaggcccaggcccagctggccagcctctactctgccctgcagcaggccctggggtctgtttgtgagagcaggcctgagctgagtggtgggggagactctgctccttccgtctggggccttgagccagaccagaatggagctaggagcctctttaagagagggcccctgctgactgctctctccgctgaggcagtagcatctgccctccacaagcttcatcaagacctgtggaagactcaacagacccgggatgttctgagggatcaggtccagaaactggaagagcgtctaactgatactgaggctgagaagagccaggtccacacagagttgcaggatctgcagagacagctctcccagaatcaggaagagaaatccaagtgggaaggaaagcagaactccctagaatctgagctgatggaactacatgaaactatggcatccttacagagtcgcctgcggagagcagagctacagcgaatggaagcccagggtgagcgagagttacttcaggcagccaaggagaacctgacagcccaggtggaacacctgcaagcagctgtcgtagaagccagggctcaggcaagtgctgctggcatcctggaagaagacctgagaacggctcgctcagcactgaagctgaaaaatgaggaagtagagagtgagcgtgagagagcccaggctctgcaagagcagggcgaactgaaggtggcccaagggaaggctctgcaagagaatttggccctcctgacccagaccctagctgaaagagaagaggaggtggagactctgcggggacaaatccaggaactggagaagcaacgggaaatgcagaaggctgctttggaattgctgtctctggacctgaagaagaggaaccaagaggtagatctgcagcaagaacagattcaggagctagagaagtgtaggtctgttttagagcatctgcccatggccgtccaggagcgagagcagaagctgactgtgcagagggagcagatcagagagctcgagaaggatcgggagactcagaggaacgtcttggagcatcagcttctagaacttgagaagaaagaccaaatgattgagtcccagagaggacaggttcaggacctgaaaaagcagttggttactctggaatgcctggccctggaactggaggaaaaccatcacaagatggagtgccagcaaaaactgatcaaggagctggagggccagagggaaacccagagagtggctttgacccaccttacgctggacctagaagaaaggagccaggagctgcaggcacaaagcagccagatccatgacctggagagccacagcaccgttctggcaagagagctgcaggagagggaccaggaggtgaagtctcagcgagaacagatcgaggagctgcagaggcagaaagagcatctgactcaggatctcgagaggagagaccaggagctgatgctgcagaaggagaggattcaggttctcgaggatcagaggacccggcagaccaagatcctggaggaggacctggaacagatcaagctgtccttgagagagcgaggccgggagctgaccactcagaggcagctgatgcaggaacgggcagaggaagggaagggcccaagtaaagcacagcgcgggagcctagagcacatgaagctgatcctgcgtgataaggagaaggaggtggaatgtcagcaggagcatatccatgaactccaggagctcaaagaccagctggagcagcagctccagggcctgcacaggaaggtaggtgagaccagcctcctcctgtcccagcgagagcaggaaatagtggtcctgcagcagcaactgcaggaagccagggaacaaggggagctgaaggagcagtcacttcagagtcaactggatgaggcccagagagccctagcccagagggaccaggaactggaggctctgcagcaagaacagcagcaggcccagggacaggaggagagggtgaaggaaaaggcagacgccctccagggagctctggagcaagcccatatgacactgaaggagcgtcatggagagcttcaggaccacaaggaacaggcacgaaggctggaggaagagctggcagtggagggacggcgggtccaggccctggaggaggtgctgggagacctaagggctgagtctcgggaacaggagaaagctctgttggccctccagcagcagtgtgctgagcaggcacaggagcatgaggtggagaccagggccctgcaggacagctggctgcaggcccaggcagtgctcaaggaacgggaccaggagctggaagctctgcgggcagaaagtcagtcctcccggcatcaggaggaggctgcccgggcccgggctgaggctctgcaggaggcccttggcaaggctcatgctgccctgcaggggaaagagcagcatctcctcgagcaggcagaattgagccgcagtctggaggccagcactgcaaccctgcaagcctccctggatgcctgccaggcacacagtcggcagctggaggaggctctgaggatacaagaaggtgagatccaggaccaggatctccgataccaggaggatgtgcagcagctgcagcaggcacttgcccagagggatgaagagctgagacatcagcaggaacgggagcagctgctggagaagtctctggcccagagggtccaagagaatatgatccaagagaagcagaatctggggcaagagagagaagaggaggagataaggggccttcatcagagtgtaagggagctacagctgactctagcccaaaaggaacaggagattctggagctgagggagacccagcaaaggaacaacctggaagccttaccccacagccacaaaacctccccaatggaggaacaatctctaaaacttgattctttagagcccaggctgcagcgggagctggagcggctacaggcagccctgagacagacagaagccagggagattgagtggagggagaaggcccaggacttggcactctccctagcgcagaccaaggccagtgtcagcagtctgcaggaggtagccatgttcctacaagcctctgtcctggagcgggactcagaacagcaaaggctgcaggatgaactggagctcaccagacgggctctggagaaggagcggctacacagcccaggtgcaaccagcacagcagaactggggtccagaggggagcagggtgtgcagctgggagaggtctcaggagtggaggctgagcctagtcctgatggaatggagaagcagtcatggagacaaaggcttgaacacctgcagcaagcagtggcccggctggagattgacaggagcaggctgcagcgccacaatgtccagctgcggagtaccttggagcaggtggagcgagaacggaggaagctgaagagggaggccatgcgtgcggcccaggcagggtccctagagatcagcaaggccacggcttcttcacccacacagcaggatgggagaggacagaagaactcagatgccaagtgtgtggctgaactgcagaaagaggtggtcctgctgcaagctcagctgactttggagcggaagcagaagcaggactacatcacccgctcagcacagaccagccgtgagctagcaggcctgcaccacagcctctcacactcacttcttgccgtggcccaggcccctgaggccactgtcctggaggcagagacccgcaggctggatgagtccctgactcaaagtctgacatccccagggccagtcctgctacaccccagccccagcactacccaagccgcctccaggtagcagccacagccaggagcacacagacagaagactgtgtcatgggtcatggcccctccgcacacctacaggtttgccaaaggaaaagcctggctctgttaggcacccaggagccccaggtcggcgggtgttcccaggaagaggaagtaaatctgcaaccctggggaggaccccaactcacctgggaatgaggcaaattgcatttgcttgctccctatggaatcacccagaggggtgccttgccctggctgagggacatgtactgcctctcatctagaatttattttcctagcacttcaccacctccttcatcttctccttcaacaataaaccctgagatctttgcattcaaaaaaaaaaaaaaaaaa

SEQ ID NO: 5745 - DNA, 1337 bp, Homo sapiens
ctggcgtcccctttccggccggtccccatggaggcgctggggaagctgaagcagttcgatgcctaccccaagactttggaggacttccgggtcaagacctgcgggggcgccaccgtgaccattgtcagtggccttctcatgctgctactgttcctgtccgagctgcagtattacctcaccacggaggtgcatcctgagctctacgtggacaagtcgcggggagataaactgaagatcaacatcgatgtactttttccgcacatgccttgtgcctatctgagtattgatgccatggatgtggccggagaacagcagctggatgtggaacacaacctgttcaagcaacgactagataaagatggcatccccgtgagctcagaggctgagcggcatgagcttgggaaagtcgaggtgacggtgtttgaccctgactccctggaccctgatcgctgtgagagctgctatggtgctgaggcagaagatatcaagtgctgtaacacctgtgaagatgtgcgggaggcatatcgccgtagaggctgggccttcaagaacccagatactattgagcagtgccggcgagagggcttcagccagaagatgcaggagcagaagaatgaaggctgccaggtgtatggcttcttggaagtcaataaggtggccggaaacttccactttgcccctgggaagagcttccagcagtcccatgtgcacgtccatgacttgcagagctttggccttgacaacatcaacatgacccactacatccagcacctgtcatttggggaggactatccaggcattgtgaaccccctggaccacaccaatgtcactgcgccccaagcctccatgatgttccagtactttgtgaaggtggtgcccactgtgtacatgaaggtggacggagaggtactgaggacaaatcagttctctgtgaccagacatgagaaggttgccaatgggctgttgggcgaccaaggccttcccggagtcttcgtcctctatgagctctcgcccatgatggtgaagctgacggagaagcacaggtccttcacccacttcctgacaggtgtgtgcgccatcattgggggcatgttcacagtggctggactcatcgattcgctcatctaccactcagcacgagccatccagaagaaaattgatctagggaagacaacgtagtcaccctcggtgcttcctctgtctcctctttctccctggcctgtggttgtcccccagcctctgccaccctccacctcctcggtcagccccagccccaggttgataaatctattgattgattgtgatagtaaaaaaaaaaaaaaaaaaaaaaaaaaaaa

SEQ ID NO: 5746 - protein, 383 aa, Homo sapiens
MEALGKLKQFDAYPKTLEDFRVKTCGGATVTIVSGLLMLLLFLSELQYYLTTEVHPELYVDKSRGDKLKINIDVLFPHMPCAYLSIDAMDVAGEQQLDVEHNLFKQRLDKDGIPVSSEAERHELGKVEVTVFDPDSLDPDRCESCYGAEAEDIKCCNTCEDVREAYRRRGWAFKNPDTIEQCRREGFSQKMQEQKNEGCQVYGFLEVNKVAGNFHFAPGKSFQQSHVHVHDLQSFGLDNINMTHYIQHLSFGEDYPGIVNPLDHTNVTAPQASMMFQYFVKVVPTVYMKVDGEVLRTNQFSVTRHEKVANGLLGDQGLPGVFVLYELSPMMVKLTEKHRSFTHFLTGVCAIIGGMFTVAGLIDSLIYHSARAIQKKIDLGKTT

SEQ ID NO: 5747 - DNA, 1985 bp, Homo sapiens
  unsure 1822: unknown base
accaggcaaatattccattcagcattacaaagatggatgttcttcagttcctagaaggaatcccagtggatgaaaatgctgtacatgttcttgttgataacaatgggcaaggtctaggacaggcattggttcagtttaaaaatgaagatgatgcacatggcccactgcgtgaccttggttcagctgtccatttcctgtgaccatctcattgacaaggacatcggctccaagtctgacccactctgcgtccttttacaggatgtgggagggggcagctgggctgagcttggccggactgaacgggtgcggaactgctcaagccctgagttctccaagactctacagcttgagtaccgctttgagacagtccagaagctacgctttggaatctatgacatagacaacaagacgccagagctgagggatgatgacttcctagggggtgctgagtgttccctaggacagattgtgtccagccaggtactgactctccccttgatgctgaagcctggaaaacctgctgggcgggggaccatcacggtctcagctcaggaattaaaggacaatcgtgtagtaaccatggaggtagaggccagaaacctagataagaaggacttcctgggaaaatcagatccatttctggagttcttccgccagggtgatgggaaatggcacctggtgtacagatctgaggtcatcaagaacaacctgaaccctacatggaagcgtttctcagtccccgttcagcatttctgtggtgggaaccccagcacacccatccaggtgcaatgctccgattatgacagtgacgggtcacatgatctcatcggtaccttccacaccagcttggcccagctgcaggcagtcccggctgagtttgaatgcatccaccctgagaagcagcagaaaaagaaaagctacaagaactctggaactatccgtgtcaagatttgtcgggtagaaacagagtactcctttctggactatgtgatgggaggctgtcagatcaacttcactgtgggcgtggacttcactggctccaatggagacccctcctcacctgactccctacactacctgagtccaacaggggtcaatgagtacctgatggcactgtggagtgtgggcagcgtggttcaggactatgactcagacaagctgttccctgcatttggatttggggcccaggttccccctgactggcaggtctcgcatgaatttgccttgaatttcaaccccagtaacccctactgtgcaggcatccagggcattgtggatgcctaccgccaagccctgccccaagttcgcctctatggccctaccaactttgcacccatcatcaaccatgtggccaggtttgcagcccaggctgcacatcaggggactgcctcgcaatacttcatgctgttgctgctgactgatggtgctgtgacggatgtggaagccacacgtgaggctgtggtgcgtgcctcgaacctgcccatgtcagtgatcattgtgggtgtgggtggtgctgactttgaggccatggagcagctggacgctgatggtggacccctgcatacacgttctgggcaggctgctgcccgcgacattgtgcagtttgtaccctaccgccggttccagaatgcccctcgggaggcattggcacagaccgtgctcgcagaagtgcccacacaactggtctcatacttcagggcccagggttgggccccgctcaagccacttccaccctcagccaaggatcctgcacaggccccccaggcctaggttcccttggaggctgtggcaagtcctcaatcctgtgtcccagaggtccctntgggccacaacccaacccttctcactctcctcagtgctagcactttgtattttttgatacttttatacttgtttctgcttttgctgctcttgatcccacctttgctcctgacaaccctcattcaataaagaccagtgaagaccaaaaaaaaaaaaaaaaaaaa

SEQ ID NO: 5748 - protein, 537 aa, Homo sapiens
MAHCVTLVQLSISCDHLIDKDIGSKSDPLCVLLQDVGGGSWAELGRTERVRNCSSPEFSKTLQLEYRFETVQKLRFGIYDIDNKTPELRDDDFLGGAECSLGQIVSSQVLTLPLMLKPGKPAGRGTITVSAQELKDNRVVTMEVEARNLDKKDFLGKSDPFLEFFRQGDGKWHLVYRSEVIKNNLNPTWKRFSVPVQHFCGGNPSTPIQVQCSDYDSDGSHDLIGTFHTSLAQLQAVPAEFECIHPEKQQKKKSYKNSGTIRVKICRVETEYSFLDYVMGGCQINFTVGVDFTGSNGDPSSPDSLHYLSPTGVNEYLMALWSVGSVVQDYDSDKLFPAFGFGAQVPPDWQVSHEFALNFNPSNPYCAGIQGIVDAYRQALPQVRLYGPTNFAPIINHVARFAAQAAHQGTASQYFMLLLLTDGAVTDVEATREAVVRASNLPMSVIIVGVGGADFEAMEQLDADGGPLHTRSGQAAARDIVQFVPYRRFQNAPREALAQTVLAEVPTQLVSYFRAQGWAPLKPLPPSAKDPAQAPQA

SEQ ID NO: 5749 - DNA, 476 bp, Homo sapiens
gacgcggggccggaacgcgaagagggtggtggagtcgggctacccactgattttccttcccttacttcccctgagcccttgggcccacttcccagcctaccgcttccgtccccgcccgactcttgggccagcgcctgggcccacactttcctatcccccgcagatgccggtggccgtgggtccctacggacagtcccagccaagctgcttcgaccgtgtcaaaatgggcttcgtgatgggttgcgccgtgggcatggcggccggggcgctcttcggcaccttttcctgtctcaggatcggaatgcggggtcgagagctgatgggcggcattgggaaaaccatgatgcagagtggcggcacctttggcacattcatggccattgggatgggcatccgatgctaaccatggttgccaactacatctgtcccttcccatcaatcccagcccatgtactaataaaagaaagtctttgagt

SEQ ID NO: 5750 - DNA, 916 bp, Homo sapiens
ggacgcagagaagccagagactttcgcttccggctgccgcaggcgcttcgctggtgcaggtaagctccgcacactctcggccggtcccgagtccgactccctcaagggtgacgcgagctctgccctttaaccggaaacgtctccctgctcaccccacccccgcgcagacgcagtgctgagcacacagctaccggacaaagagtgacgcccggagctggagttatggcggctacggagccgatcttggcggccactgggagtcccgcggcggtgccaccggagaaactggaaggagccggttcgagctcagcccctgagcgtaactgtgtgggctcctcgctgccagaggcctcaccgcctgcccctgagccttccagtcccaacgccgcggtccctgaagccatccctacgccccgagctgcggcctccgcggccctggagctgcctctcgggcccgcacccgtgagcgtagcgcctcaggccgaagctgaagcgcgctccacaccaggccccgccggctctagactcggtcccgagacgttccgccagcgtttccggcagttccgctaccaggatgcggcgggtccccgggaggctttccggcagctgcgggagctgtcccgccagtggctgcggcctgacatccgcaccaaggagcagatcgtggagatgctggtgcaagagcagctgctcgccatcctgcccgaggcggctcgggcccggcggatccgccgccgcacggatgtgcgcatcactggctgagcggtggagctgcgggcggccagggccgggcgctctgtgcggactggggccatgatcgggcccgggggcctgagcctgggaccccaccccgtgttaatgaaaaatgagttttggcagcgccaaaaaaaaaaaaaaaaaaaaaaaaaaaaaaaaa

SEQ ID NO: 5751 - protein, 179 aa, Homo sapiens
MAATEPILAATGSPAAVPPEKLEGAGSSSAPERNCVGSSLPEASPPAPEPSSPNAAVPEAIPTPRAAASAALELPLGPAPVSVAPQAEAEARSTPGPAGSRLGPETFRQRFRQFRYQDAAGPREAFRQLRELSRQWLRPDIRTKEQIVEMLVQEQLLAILPEAARARRIRRRTDVRITG

SEQ ID NO: 5752 - DNA, 2684 bp, Homo sapiens
ctttttcctttcctgattccttgtgtatgtgtggctgggccgcccctcttctcggctcagagtcacggagtgccttgaactaggcccacctcgccggggcggctggttctctgtttgtgggacgctggtgtctctggaggcccttcctgagaagccgtcgccagagttacgtcgcggttttcttaactttagagcctgggggccggagaccctgattgcactcgacctggctctgccctactctctgcgtgacttccactgttcatcaaagaaaaagggttcttttggtcacccaccactggccccatggctgccgtgcagatggatcctgagctagccaagcgcctcttctttgaaggggccactgtggtcatcctgaacatgcccaagggaacagagtttgggattgactataactcctgggaggtcgggcccaagttccggggcgtgaagatgatccctccaggcatccacttcctccactacagctctgtggacaaggctaatccgaaggaagtaggccctcgtatgggtttcttccttagcctgcaccagcgggggctgacagtgctgcgctggagcacactcagggaagaggtagacctgtccccagccccagagtctgaggtggaggccatgagggccaacctccaggagctggaccagttcctggggccttacccatatgccaccctgaagaagtggatctcactcaccaacttcatcagcgaagccacagtggagaagctacagcccgagaatcgacagatctgtgccttttccgatgtgctacctgtgctctccatgaagcacaccaaggaccgcgtggggcagaatctaccccgctgtggcattgagtgcaaaagctaccaagagggcctggcccggctaccagagatgaagcccagagccgggacagagatccgcttctcagagctgcccacgcagatgttcccagagggtgccacgccagctgagataaccaagcacagcatggacctgagctatgccctggagactgtgctcaacaagcagttccccagcagcccccaggatgtgcttggtgaactccagtttgcttttgtgtgcttcctgctggggaatgtgtacgaggcatttgagcattggaagcggctcctgaacctcctgtgccggtcagaagcagccatgatgaagcaccacaccctctacatcaacctcatctccatcctgtaccaccagcttggtgagatccccgctgacttcttcgtagacattgtctcccaagacaacttcctcaccagcaccttacaggttttcttttcctctgcctgcagcattgccgtggatgccaccctgagaaagaaagctgaaaagttccaagctcacctgaccaagaagttccggtgggactttgctgcggaacctgaggactgtgccccggtggtggtggagctccctgagggcatcgagatgggctaactcggggagcgctctcagctgcgaggggccccttcccacagggctgcagtcctggcctctccatttacttcttcccatcctgggacctgccagggcagcaatctctccaggtcctgcaaagatggagccagaattccctttttcactgataaatatatttcttcattgccaaagaggctgtacccatcctgaaggcacatttgtgggttccccatcagccaggccttggtgctaacctggctgaatttcacacaggctcttacacacacacgctcctaggagacatctgcctacacggcaaccatatttcctctgaatgagaaggaattgaaccaaaagtccaagaaagaactgattgcttgttccataggagcttaggaaacaagaaaccctggattgcccagggggtctgagaagttggttggtgactttttttgcggttaaatgaagggtgatggggagatcagcccgaattgccgcctgcctcttgctaaataggagcagaggacttggcctgcagctccttgggagcccttgattgggaagagagtttcaagggaggcagctggattcaatctagcaggtggtcagcttcagctttctccatcgaaatcccattctcctgtccagaggcccagtgggtcatctcccaaggtgggtgtggaccctggcctcagaggccttgctggtgctgtcacctcccacctgttccattccgaggcctcacccagaagtgggaccctccccttcctcaccagagccaccgtgactgtttctgatgacctggagagtcaacaacaaccagaaaggtttctgcccagagcaggcttcttaaggcctttacgaagttttgtgccttccaagtgctgaagaagacctggtcagcctaaatcttcccagtcccgctgtggagctgtcagtcaccggagtaatgagctcctggttcctcgggagtccttcgtgctgtgtggcagggttcctctctagacaagtacacaggccctgccaccctgacatcaaactgttgtactatgatcacagtccctgtgccatccttttccaagactggggctcacaccatgtttttgaatgagaatccctgctggttgagacttttgcttccacttgtttccttggagatgtttttccaagagcataatgtacattaaagtcttcgagttgagaccaaaaaaaaaaaaaaaaaaaaaaaaaaaaaaaaaaaa

SEQ ID NO: 5753 - protein, 384 aa, Homo sapiens
MAAVQMDPELAKRLFFEGATVVILNMPKGTEFGIDYNSWEVGPKFRGVKMIPPGIHFLHYSSVDKANPKEVGPRMGFFLSLHQRGLTVLRWSTLREEVDLSPAPESEVEAMRANLQELDQFLGPYPYATLKKWISLTNFISEATVEKLQPENRQICAFSDVLPVLSMKHTKDRVGQNLPRCGIECKSYQEGLARLPEMKPRAGTEIRFSELPTQMFPEGATPAEITKHSMDLSYALETVLNKQFPSSPQDVLGELQFAFVCFLLGNVYEAFEHWKRLLNLLCRSEAAMMKHHTLYINLISILYHQLGEIPADFFVDIVSQDNFLTSTLQVFFSSACSIAVDATLRKKAEKFQAHLTKKFRWDFAAEPEDCAPVVVELPEGIEMG

SEQ ID NO: 5754 - DNA, 1116 bp, Homo sapiens
ggaagccccacccaccagaagccaagatgtccagcaagcgggccaaagccaagaccaccaagaagcggccacagcgggccacatccaatgtcttcgcaatgtttgaccagtcccagatccaggagtttaaggaggctttcaacatgattgaccagaaccgtgatggcttcattgacaaggaggacctgcacgacatgctggcctcgctggggaagaaccccacagacgaatacctggagggcatgatgagcgaggccccggggcccatcaacttcaccatgttcctcaccatgtttggggagaagctgaacggcacggaccccgaggatgtgattcgcaacgcctttgcctgcttcgacgaggaagcctcaggtttcatccatgaggaccacctccgggagctgctcaccaccatgggtgaccgcttcacagatgaggaagtggacgagatgtaccgggaggcacccattgataagaaaggcaacttcaactacgtggagttcacccgcatcctcaaacatggcgccaaggataaagacgactaggccaccccagccccctgacaccccagcccccgccagtcacccctccccgcacacacccgtccataccagctccctgcccatgaccctcgctcagggatccccctttgaggggttagggtcccagttcccagtggaagaaacaggccaggagaagtgcgtgccgagctgaggcagatgttcccacagtgaccccagagccctgggctatagtctctgacccctccaaggaaagaccaccttctggggacatgggctggagggcaggacctagaggcaccaagggaaggccccattccggggctgttccccgaggaggaagggaaggggctctgtgtgccccccaggaggaagaggccctgagtcctgggatcagacaccccttcacgtgtatccccacacaaatgcaagctcaccaaggtcccctctcagtccccttccctacaccctgaccggccactgccgcacacccacccagagcacgccacccgccatgggagtgtgctcaggagtcgcgggcagcgtggacatctgtcccagagggggcagaatctccaatagaggactgagcact

SEQ ID NO: 5755 - protein, 172 aa, Homo sapiens
MSSKRAKAKTTKKRPQRATSNVFAMFDQSQIQEFKEAFNMIDQNRDGFIDKEDLHDMLASLGKNPTDEYLEGMMSEAPGPINFTMFLTMFGEKLNGTDPEDVIRNAFACFDEEASGFIHEDHLRELLTTMGDRFTDEEVDEMYREAPIDKKGNFNYVEFTRILKHGAKDKDD

SEQ ID NO: 5756 - DNA, 3429 bp, Homo sapiens
gcggggggtgggcgcagctcgtcgcgctccgcacaaagtttgttttctccctccgggcgggtgggggagggcgcagagggcgcggggggaggagaggggatctgacgtcaggccgcgaggtgctttccagccgcgagctgtcaggccgagtgtcaggccgggcaggtttacccaaggtccagcctagcccctaggcaccatgtcggacagtgatctaggtgaggacgaaggcctcctctccctggcgggcaaaaggaagcgcagggggaacctgcccaaggagtcggtgaagatcctccgggactggctgtacttgcaccgctacaacgcctacccctcagagcaggagaagctgagcctttctggacagaccaacctgtcagtgctgcaaatatgtaactggttcatcaatgcccggcggcggcttctcccagacatgcttcggaaggatggcaaagaccctaatcagtttaccatttcccgccgcgggggtaaggcctcagatgtggccctcccccgtggcagcagcccctcagtgctggctgtgtctgtcccagcccccaccaatgtgctctccctgtctgtgtgctccatgccgcttcactcaggccagggggaaaagccagcagcccctttcccacgtggggagctggagtctcccaagcccctggtgacccctggtagcacacttactctgctgaccagggctgaggctggaagccccacaggtggactcttcaacacgccaccacccacacccccagagcaggacaaagaggacttcagcagcttccagctgctggtggaggtggcgctacagagggctgctgagatggagcttcagaagcagcaggacccatcactcccattactgcacactcccatccctttagtctctgaaaatccccagtaggcatctgccaagaagggtgctgaaggctccagccagctgtcctgggtttccgttttggttccctttcatacagagggttttctatggatcactgccaaacattgggatcatctcctctgtccagaggtcttcaacaggaagatgccagctggcaccactgcactgtgatgggggccctctcctctgctgactctgccgtttctccaggcctccgctcagtgatgagaccaagagatcggagacaagcatggtgctgctgcttctgctgcttctccagaaaatccctgggacacctttgttccagcctggtttcctgggctgggctcaggaaagctgccaaattcagtcctatgttgggtccaagctgcccctgtgctgtttctgtcaagccaggtgtggacattccaagttcatatgcgtgaacaaaagaaaagaggaacccagtggatgtaacagaaccgactccagttgaatgtttagatttttgctaaactgttttctttttcccttttttgctgtggtttgcattcacggcagtagttagcccaggtgtggggaacgagagtgcactgcatgatagcgttctggtgagctgggaaggacccaccactgccactgaggattgttttggaagaaaggaatatttttatcttggggaccagctaagtctctgcagtagtgtgaaattccaaatggttgttttatcattggtttggtttaccaaaaaaaaggcagggaaaaaaaaaaaaaacaaccgtatgagcgcattggcttgtctgccgcaggcacagaagggtagaaagccacagcagggggcagtccagcagactctgactcaactttctaggcacctagcagagaaagataagatcaaaaggtgtttggtttttcttttaatttttattgtagtttttttgggtgggtgggggaagtaaactagactgaagcgatggattttttttttcttttttttctttagtgtttttccctttgttcttgaacacttttgccctgcagcctcagttttgaattcttttagcaacttggattagaggggcccatatgtcagaagctcccagcacctcctacttgggagaaaagtgagccatctgctggtcaggaagtcctccagagaggcagcttttcccacaatggtggcaggaaactttggggaaagcaggaatggtgtccactgctgcggaggaactgccttcagagaaggtggggctggaaaagggttagaagcctcctagctgggattgtctttgtttcacctttctttaaattagaattacagaagcccctgcccagtgaacagataacgattggtcttatgctcctccctttcccccattttttcttttgctgttttgttttttgttttttgtttgtttgtttgtttttttgagacagagtcatgctctgtcacccgggctggagtgcagtggtgcgatctcagctcactgtaacctccgcctcccgggttcaagcaattatttgcctcagcctcccgagtagctgggattataggcacccgccaccatgtctggcttttagtagagacggggtttcaccatcttggccaggctggtcttggaactcctgacctcgtgagccaccacgcccagcctcttttgctgtttcattgctgacagtgttcaacaatatgccccatctttatatatcctaagaaacactaatcctaggttattgctagccaaaatatttttgtcctgagtagtgtcactgggccaaaagatagatcaggacgacagcctttagttttcctgaaatcaccaggtcaggcacaaggagaaaaggttcctggatactgactaacttgggtgggtggatctagccaggagaaagacagtaacatgtgttctgtactttctgggaagatccctgaagccatcacagaggctccccaacttctgagtcgcccatctgttgctgtgggagtgtgaacggatcgctgaaggagagggagctttgctctctctaggtgggcaagtttcctgggctctctgtgttgcctccctctggcttcttcctcccgtgccctctccccgtgtgccccagggggatcagggatcctcaccctcctgaggcccagtggggaagaatgaacatggcttcatccaggttaactgatgctgccatttgcccagcctcttccatcccagccctgtcagtgagcccaggtctggtgcaactgctgcaggatgcctgtagtagggaactctggaagtgtattgggctgaggtgggattttccctccccacagtgcactgagcaatggagggtggtgagggagccatgctgctgaattctggttggcatttccccattatgtaaaatggggtgttgggtagggcagactctgcttgggtttggttgtaagataaacctggaggagaagcacagttgtcccattgaattatttgagcaaaaactactgtaaataacttttttgtcttttgtcaaataaaatttttttttgtttttttaagcag

SEQ ID NO: 5757 - DNA, 1816 bp, Homo sapiens
agagtttcggaggcggtgaccgtgacgtagaaggtggagaccgcttcaccctgatcagggagtatcggctgcgggtgcgcaaggcgtccaggagtgacctggggctgtggagagcgacccgtggccttgtgtttcagagtttaccacctaggatgacttcagtgactagatcagagatcatagatgaaaaaggaccagtgatgtctaagactcatgatcatcaattggaatcaagtctcagtcctgtggaagtgtttgctaaaacaatctgccagttatcaagacaggaggcaatcctggcggcgagcaagtatgaaagaaacgaaccggcggaagtcgctgcatcccattcaccagggcatcacagagctcagccggtctatcagtgtcgatttagcagaaagcaaacggcttggctgtctcctgctttccagtttccagttctctattcagaaacttgaacctttcctaagggacactaagggcttcagtcttgaaagttttagagccaaagcatcttctctttctgaagaattgaaacattttgcagacggactggaaactgatggaactctacaaaaatgttttgaagattcaaatggaaaagcatcagatttttctttggaagcatctgtggctgagatgaaggaatacataacaaagttttctttagaacgtcagacttgggatcagctcttgcttcactaccagcaggaggctaaagagatattgtccagaggatcaactgaggccaaaattactgaggtcaaagtggaacctatgacatatcttgggtcttctcagaatgaagttcttaatacaaaacctgactaccagaaaaattacagaaccagagcaaagtctttgactgtatggagttggtgatggatgaactgcaaggatcagtgaaacagctgcaggcctttatggatgaaagtacccagtgcttccagaaggtgtcagtacagctcggaaagagaagcatgcaacaattagatccctcaccagctcgaaaactgttgaagcttcagctacagaacccacctgccatacatggatctggatctggatcttgtcagtgactttatgagagtttctgccacaaggtgcccaagaggagaggaatgggaagagtgccccagcacgtggtgactgcgtgatttctgctcgttgcctttgaagataactggcaggactgactgtagaacactttgacttttttcaaaaagtgatggaatttgtacatccaaatgaatattgtatagacaattttcccaggaatgtgcaaaatgcttgaaagttcaaacttcttttttgaaatgatcttcagatccagtggcccattcttttatctttatcctgtgaaggtgtttttcaggttttgaaacaatccaaaaatcatttaggaccaagtctaaggaaacattttagtggccaagttggattccgattgtaaaggaatgatactaattttctagcatggctctgaaggtgattttaggtagaagagttttgaggctgggcgcaatggctcacgcctgtaatcctagcattttgggtgactgaggcgggtggattgcttgagcccagaagttgaagaccagcctgagaaataaggtgaaaccctgtctacaaaaaatacaaaaagttagctgggtgtggtggcgtgtgcctgtagtgctagctactcagaaggctgaggtgggaggattgtttgagcccaggaggttgaggctgcagtgagttctaattgcgccactgcactccagcctgagcgacagagtgagacactgtcttaaaaaaaattaaaaattgt

SEQ ID NO: 5758 - protein, 223 aa, Homo sapiens
MIINWNQVSVLWKCLLKQSASYQDRRQSWRRASMKETNRRKSLHPIHQGITELSRSISVDLAESKRLGCLLLSSFQFSIQKLEPFLRDTKGFSLESFRAKASSLSEELKHFADGLETDGTLQKCFEDSNGKASDFSLEASVAEMKEYITKFSLERQTWDQLLLHYQQEAKEILSRGSTEAKITEVKVEPMTYLGSSQNEVLNTKPDYQKNYRTRAKSLTVWSW

SEQ ID NO: 5759 - DNA, 2484 bp, Homo sapiens
agcgttgcgagacggtcggttccaagtgggcctgggcgcgggggagaggcgggtctgtcctcgggaactgcaaggccctgtgagcgggaggactgggatcccggccgcggctgctggaagcgtcgaagctcagcggggccgcggacactgacctgtgcttagaactcatcctggcccgcagagcctgccgcgagtccctggcgtcccctgtggcgggctcttggagccactttcccgagcggaagtcagcccgcggctcggactccggcgggacctgctcggaggaatggcgccgccgggttcaagcactgtcttcctgttggccctgacaatcatagccagcacctgggctctgacgcccactcactacctcaccaagcatgacgtggagagactaaaagcctcgctggatcgccctttcacaaatttggaatctgccttctactccatcgtgggactcagcagccttggtgctcaggtgccagatgcaaagaaagcatgtacctacatcagatctaaccttgatcccagcaatgtggattccctcttctacgctgcccaggccagccaggccctctcaggatgtgagatctctatttcaaatgagaccaaagatctgcttctggcagctgtcagtgaggactcatctgttacccagatctaccatgcagttgcagctctaagtggctttggccttcccttggcatcccaagaagcactcagtgcccttactgctcgtctcagcaaggaggagactgtgctggcaacagtccaggctctgcagacagcatcccacctgtcccagcaggctgacctgaggagcatcgtggaggagattgaggaccttgttgctcgcctggatgaactcgggggcgtgtatctccagtttgaagaaggactggaaacaacagcgttatttgtggctgccacctacaagctcatggatcatgtggggactgagccatccattaaggaggatcaggtcatccagctgatgaacgcgatcttcagcaagaagaactttgagtccctctccgaagccttcagcgtggcctctgcagctgctgtgctctcgcataatcgctaccacgtgccagttgtggttgtgcctgagggctctgcttccgacactcatgaacaggctatcttgcggttgcaagtcaccaatgttctgtctcagcctctgactcaggccactgttaaactagaacatgctaaatctgttgcttccagagccactgtcctccagaagacatccttcacccctgtaggggatgtttttgaactaaatttcatgaacgtcaaattttccagtggttattatgacttccttgtcgaagttgaaggtgacaaccggtatattgcaaataccgtagagctcagagtcaagatctccactgaagttggcatcacaaatgttgatctttccaccgtggataaggatcagagcattgcacccaaaactacccgggtgacatacccagccaaagccaagggcacattcatcgcagacagccaccagaacttcgccttgttcttccagctggtagatgtgaacactggtgctgaactcactcctcaccagacatttgtccgactccataaccagaagactggccaggaagtggtgtttgttgccgagccagacaacaagaacgtgtacaagtttgaactggatacctctgaaagaaagattgaatttgactctgcctctggcacctacactctctacttaatcattggagatgccactttgaagaacccaatcctctggaatgtggctgatgtggtcatcaagttccctgaggaagaagctccctcgactgtcttgtcccagaaccttttcactccaaaacaggaaattcagcacctgttccgcgagcctgagaagaggccccccaccgtggtgtccaatacattcactgccctgatcctctcgccgttgcttctgctcttcgctctgtggatccggattggtgccaatgtctccaacttcacttttgctcctagcacgattatatttcacctgggacatgcagctatgctgggactcatgtatgtctactggactcagctcaacatgttccagaccttgaagtacctggccatcctgggcagtgtgacgtttctggctggcaatcggatgctggcccagcaggcagtcaagagaacagcacattagttccagaagaaagatggaaattctgaaaactgaatgtcaagaaaaggagtcaagaacaattcacagtatgagaagaaaaatggaaaaaaaaaactttatttaaaaaagaaaaaagtccagattgtagttatacttttgcttgtttttcagtttccccaacacacagcagatacctggtgagctcagatagtctctttctctgacactgtgtaagaagctgtgaatattcctaacttacccagatgttgcttttgaaaagttgaaatgtgtaattgttttggaataaagagggtaacaatagg

SEQ ID NO: 5760 - DNA, 2031 bp, Homo sapiens
ggcacgagggcgagctgaggtggaggcaggctgcggcagacggcgacagtggcggcggcgccatggcagggcttgcaggatccctgctgccttggtgatcccgggctgacagccagagagcacagcggctcagctcctggagagtgagggttgaagaaagcggagggcagccgcctgcgcccgctggctcccattaggtcggttcctgcagcggtgcccggcagccttggtgaaggccctgcccggcagagatcatgtattgcctccagtggctgctgcccgtcctcctcatccccaagcccctcaaccccgccctgtggttcagccactccatgttcatgggcttctacctgctcagcttcctcctggaacggaagccttgcacaatttgtgccttggttttcctggcagccctgttccttatctgctatagctgctggggaaactgtttcctgtaccactgctccgattccccgcttccagaatcggcgcatgatcccggcgttgtgggcacctaacggcctgccctgttagctttccaaggaagcagaagacgggaggggaggcattgacataggtcataaagcattggagtttcaaatcccgcagcctcgcgggtgtcacattcctgacggcgcctttttggcctgtgatgttttatccttacaatgtgaataatggcactgaccggtgcttttattgtaaagtcctatagtcgtgggtggtcttgtggttgtgtgtgttctgtccccatctaggtcctggctggccgcatgaccacccctctcgcctcattactgtgaggagtctgggtccatcctggtcagctgccccaatgtgacctggggcagataaaatgccagtctcattgtcacctctgtgacccctccttgtcagggtctccttccttcccagaatgttactgactcctcagtccctcttctggtttccctttatttctcttctacccttttccttttttggggagtacctgtccaagacagggctcatttttgcacttatctcgaatttgaagagattgctgacgcccgagagcctcgctttttcatccttctttccttgttcagcaggctagacagaaacatgtcttgactgttagttgtccacaaatcttcagtattttctccacttcatttttaagaaaggaagcaacagatagatgttgctctttcacctgggtgtctgggctcaagctttcccgcccagcctcacttcctttgcccttcctcctgcctttctcaactgtcccaaggagggggcctcattgtgtctcccgtgcatgctctgcagcattgaagtatggtgtgttcacgtagttctagcagtccccagctgagtgagtgggagagtacctgtgtgtttcgtaacggccttgatccccttgatagatgtttggatattttttggtgtgccctgtgtgtgtgtgtgtgtacaaatacatgtgtatattccttttaaagaagctttatcgaacgtggtctgattttgaggtttagcaatagctagctatatatggtaggtgccgctacagtttttatttagcatggggattgcagagtgaccagcacactggactccgaggtggttcagacaagacagaggggagcagtggccatcatcctcccgccaggagcttcttcgttcctgcgcatatagactgtacgttatgaagaatacccaggaagactttgtgactgtcacttgctgctttttctgcgcttcagtaacaagtgttggcaaacgagactttctcctggcccctgcctgctggagatcagcatgcctgtcctttcagtctgatccatccatctctctcttgcctgaggggaaagagagatgggccaggcagagaacagaactggaggcagtccatctagggaatgggactgtgaggccatacttgtgaaacgtctggactgctattctagagcttttatttggtgtgttcgttgcacagctgtttgaaatgtttaataaagctttataaactttaaaaaaaaaaaaaaaaaa

SEQ ID NO: 5761 - protein, 87 aa, Homo sapiens
MYCLQWLLPVLLIPKPLNPALWFSHSMFMGFYLLSFLLERKPCTICALVFLAALFLICYSCWGNCFLYHCSDSPLPESAHDPGVVGT

SEQ ID NO: 5762 - DNA, 1300 bp, Homo sapiens
taggtggcgggcgggtacttaaggcgcggccaccgcggctgcggcagtgcgcccaacagcggactccgagaccagcggatctcggcaaaccctctttctcgaccacccacctaccattcttggaaccatggcggcagtggcggcggcctcggctgaactgctcatcatcggctggtacatcttccgcgtgctgctgcaggtgttcctggaatgctgcatttactgggtaggattcgcttttcgaaatcctccagggacacagcccattgcgagaagtgaggtgttcaggtactccctgcagaagctggcatacacggtgtcgcggaccgggcggcaggtgttgggggagcgcaggcagcgagcccccaactgaggccccagctcccagccctgggcggccgtatcatcaggtgctcctgtgcatctcggccagcacgggagccagtgccgcgcaggaatgtggggtcccctgtgttccctcgccagaggagcacttggcaaggtcagtgaggggccagtagacccccggagaagcagtaccgacaatgacgaagataccagatcccttcccaacccctttgcaccggtcccactaaggggcagggtcgagagaggaggggggatagggggagcagacccctgagatctgggcataggcaccgcattctgatctggacaaagtcgggacagcaccatcccagccccgaagccagggccatgccagcaggccccaccatggaaatcaaaacaccgcaccagccagcagaatggacattctgacatcgccagccgacgccctgaatcttggtgcagcaccaaccgcgtgcctgtgtggcgggactggagggcacagttgaggaaggagggtggttaagaaatacagtggggccctctcgctgtcccttgcccagggcacttgcattccagcctcgctgcatttgctctctcgattcccctttcctcctcactgcctcccaagcccaccctactccaaaataatgtgtcacttgatttggaactattcaagcagtaaaagtaaatgaatcccacctttactaaaacactttctctgaaccccccttgcccctcactgatcttgcttttccctggtctcatgcagttgtggtcaatattgtggtaatcgctaattgtactgattgtttaagtgtgcattagttgtgtctccccagctagattgtaagctcctggaggacagggaccacctctacaaaaaataaaaaaagtacctcccctgtctcgcacagtgtcccaggaccctgcggtgcagtagaggcgcacc

SEQ ID NO: 5763 - DNA, 1900 bp, Homo sapiens
  unsure 6: unknown base
gggganggggggcagtgtggctggagccgcggctgacgggcccgcggtctgggcgtgagtgcagggaagtggagtatttgctgggccgggtaccatggacgtgggcgaacttctgagctaccagcccaataggggcacaaaacgtccccgggatgatgaagaggaggagcagaagatgcgtcggaaacaaactggtactcgagaacgcggccgctatcgggaagaagaaatgactgtggtggaggaagcggatgatgacaaaaaaaggctgctgcagattattgacagagatggggaagaggaagaggaagaggaggagccattggatgaaagctcagtgaagaaaatgatcctcacatttgaaaagagatcatataaaaaccaagaattgcggattaagtttccagacaatccagagaagttcatggaatccgagctggacctaaatgacatcattcaggagatgcacgtggtggccaccatgccagacctgtaccaccttctggtggagctgaatgctgtacagtcgcttctcggcttgctcggacacgataatacagatgtgtccatagctgtggtcgatttgcttcaggaattaacagatatagacaccctccatgagagtgaagagggagcagaagtgctcatcgatgctctggtggatgggcaggtggtagcactgctggtacagaatctggagcgcctggatgagtctgtgaaagaggaggcagatggcgtccacaacactctggctattgtggaaaacatggctgagttccggcctgagatgtgtacagagggtgcccagcagggtcttctacagtggctgttgaagaggctgaaggcaaagatgccttttgatgccaacaaactgtattgcagtgaagtgctggccatattgctccaggacaatgatgaaaacagggaattgcttggggagctggatggaatcgatgtgcttcttcagcagttatccgtgtttaaaagacacaatcccagcacggctgaggagcaggagatgatggagaatctgtttgattccctctgctcctgtctaatgcttagttccaatcgtgagcgcttcctgaagggcgagggtcttcagctgatgaatctcatgctcagggaaaagaagatctcccggagcagtgccctgaaagtgctggaccatgccatgattggccccgaaggcacagacaactgccataagtttgttgacattcttggcttacgaaccatctttcccctctttatgaaatctcccaggaagatcaagaaagtgggaaccactgagaaggaacatgaagagcatgtctgttcgatcctggcttccctcctgcggaacctgagagggcagcagcggacccggcttctgaataaattcactgaaaatgacagtgagaaggttgacagactaatggagttgcattttaaatatctgggtgcaatgcaggtggcggacaagaagattgaaggggaaaaacacgacatggtccggcgaggagagatcatcgacaatgacaccgaggaggagttctacctccggcgcctggatgcggggctctttgttctccagcacatctgctacatcatggccgagatctgcaatgccaatgtcccccagattcgccagagggttcaccagatcctaaacatgcgaggaagctccatcaaaattgtcaggcatatcatcaaggagtatgcagagaacatcggggacggccggagcccggagttccgggagaacgagcaaaagcgcatcctgggcttgctggagaacttctagaggcaccttggccctgcgcatcatggactctctcagcttccctcccaggatcagtttctacacaactctgtgtggcttttggacaaattaaagctagttttggtaaaaaaaaaa

SEQ ID NO: 5764 - protein, 563 aa, Homo sapiens
MDVGELLSYQPNRGTKRPRDDEEEEQKMRRKQTGTRERGRYREEEMTVVEEADDDKKRLLQIIDRDGEEEEEEEEPLDESSVKKMILTFEKRSYKNQELRIKFPDNPEKFMESELDLNDIIQEMHVVATMPDLYHLLVELNAVQSLLGLLGHDNTDVSIAVVDLLQELTDIDTLHESEEGAEVLIDALVDGQVVALLVQNLERLDESVKEEADGVHNTLAIVENMAEFRPEMCTEGAQQGLLQWLLKRLKAKMPFDANKLYCSEVLAILLQDNDENRELLGELDGIDVLLQQLSVFKRHNPSTAEEQEMMENLFDSLCSCLMLSSNRERFLKGEGLQLMNLMLREKKISRSSALKVLDHAMIGPEGTDNCHKFVDILGLRTIFPLFMKSPRKIKKVGTTEKEHEEHVCSILASLLRNLRGQQRTRLLNKFTENDSEKVDRLMELHFKYLGAMQVADKKIEGEKHDMVRRGEIIDNDTEEEFYLRRLDAGLFVLQHICYIMAEICNANVPQIRQRVHQILNMRGSSIKIVRHIIKEYAENIGDGRSPEFRENEQKRILGLLENF

SEQ ID NO: 5765 - DNA, 3345 bp, Homo sapiens
cctccctcgggctccggtcccctgggtgagccccagcgctggcggcgtgggcccgggactgggcaatgggtggcctcccaggtcgccgccttcccgcggggccccgcccccggcccgccccaaagcgggctataagttagcgccgctctccgcctcggcagtgccagccgccagtggtcgcacttggagggtctcgccgccagtggaaggagccaccgcccccgcccgaccatggccgaggagctggtcttagagaggtgtgatctggagctggagaccaatggccgagaccaccacacggccgacctgtgccgggagaagctggtggtgcgacggggccagcccttctggctgaccctgcactttgagggccgcaactacgaggccagtgtagacagtctcaccttcagtgtcgtgaccggcccagcccctagccaggaggccgggaccaaggcccgttttccactaagagatgctgtggaggagggtgactggacagccaccgtggtggaccagcaagactgcaccctctcgctgcagctcaccaccccggccaacgcccccatcggcctgtatcgcctcagcctggaggcctccactggctaccagggatccagctttgtgctgggccacttcattttgctcttcaacgcctggtgcccagcggatgctgtgtacctggactcggaagaggagcggcaggagtatgtcctcacccagcagggctttatctaccagggctcggccaagttcatcaagaacataccttggaattttgggcagtttgaagatgggatcctagacatctgcctgatccttctagatgtcaaccccaagttcctgaagaacgccggccgtgactgctcccgccgcagcagccccgtctacgtgggccgggtggtgagtggcatggtcaactgcaacgatgaccagggtgtgctgctgggacgctgggacaacaactacggggacggcgtcagccccatgtcctggatcggcagcgtggacatcctgcggcgctggaagaaccacggctgccagcgcgtcaagtatggccagtgctgggtcttcgccgccgtggcctgcacagtgctgaggtgcctgggcatccctacccgcgtcgtgaccaactacaactcggcccatgaccagaacagcaaccttctcatcgagtacttccgcaatgagtttggggagatccagggtgacaagagcgagatgatctggaacttccactgctgggtggagtcgtggatgaccaggccggacctgcagccggggtacgagggctggcaggccctggacccaacgccccaggagaagagcgaagggacgtactgctgtggcccagttccagttcgtgccatcaaggagggcgacctgagcaccaagtacgatgcgccctttgtctttgcggaggtcaatgccgacgtggtagactggatccagcaggacgatgggtctgtgcacaaatccatcaaccgttccctgatcgttgggctgaagatcagcactaagagcgtgggccgagacgagcgggaggatatcacccacacctacaaatacccagaggggtcctcagaggagagggaggccttcacaagggcgaaccacctgaacaaactggccgagaaggaggagacagggatggccatgcggatccgtgtgggccagagcatgaacatgggcagtgactttgacgtctttgcccacatcaccaacaacaccgctgaggagtacgtctgccgcctcctgctctgtgcccgcaccgtcagctacaatgggatcttggggcccgagtgtggcaccaagtacctgctcaacctcaacctggagcctttctctgagaagagcgttcctctttgcatcctctatgagaaataccgtgactgccttacggagtccaacctcatcaaggtgcgggccctcctcgtggagccagttatcaacagctacctgctggctgagagggacctctacctggagaatccagaaatcaagatccggatccttggggagcccaagcagaaacgcaagctggtggctgaggtgtccctgcagaacccgctccctgtggccctggaaggctgcaccttcactgtggagggggccggcctgactgaggagcagaagacggtggagatcccagaccccgtggaggcaggggaggaagttaaggtgagaatggacctgctgccgctccacatgggcctccacaagctggtggtgaacttcgagagcgacaagctgaaggctgtgaagggcttccggaatgtcatcattggccccgcctaagggacccctgctcccagcctgctgagagcccccaccttgatcccaatccttatcccaagctagtgagcaaaatatgccccttcttgggccccagaccccagggcagggtgggcagcctatgggggctctcggaaatggaatgtgcccctggcccatctcagcctcctgagcctgtgggtccccactcaccccctttgctgtgaggaatgctctgtgccagaaacagtgggagccctgaccttggctgactggggctggggtgagagaggaaagacctacattccctctcctgcccagatgccctttggaaagccattgaccacccaccatattgtttgatctacttcatagctccttggagcaggcaaaaaagggacagcatgccccttggctggatcagggaatccagctccctagactgcatcccgtacctcttcccatgactgcacccagctccaggggcccttgggacagccagagctgggtggggacagtgataggcccaaggtcccctccacatcccagcagcccaagcttaatagccctccccctcaacctcaccattgtgaagcacctactatgtgctgggtgcctcccacacttgctggggctcacggggcctccaacccatttaatcaccatgggaaactgttgtgggcgctgcttccaggataaggagactgaggcttagagagaggaggcagccccctccacaccagtggcctcgtggttattagcaaggctgggtaatgtgaaggcccaagagcagagtctgggcctctgactctgagtccactgctccatttataaccccagcctgacctgagactgtcggagaggctgtctggggcctttatcaaaaaaagactcagccaagacaaggaggtagagaggggactgggggactgggagtcagagccctggctgggttcaggtcccacgtctggccaggcactgccttctcctctctgggcctttgtttccttgttggtcagaggagtgattgaaccagctcatctccaaggatcctctccactccatgtttgcaat

SEQ ID NO: 5766 - DNA, 6305 bp, Homo sapiens
cgctcctccgagatgacgccggggtcggtgccccgggcctgccctatcccctggctccagggctaggcgggaccgagggctgccccagacagacggacccgcggacccacagaccccgcgcccaggagaggagccgcgccgcccgccgctggcagcccgtcaccatggtaccctccatccctcgacacagccatccagcatgccctggcgggcctctatcctcctttcgaggccacagcacccaccgtcctgggtcaggtgttccgtctcctggactctggcttccagggggatgggctgagcttccttctggatttcctgatccctgccaagcgcctgtgtgagcaagtgcgagaagcagcctgtgctccctactcacactgcctcttcttacacgagggctggccactctgtctgagggatgaagttgtggtccacttggcacccctcaaccctctcttattgcgccagggtgacttctacctccaagtggagccccaggaggagcagtctgtctgcatcatgatcaaatgcctctccctggacctctgcacagtggacaagaagcctgttccagagccagcctaccctatacttttcacccaagaatggctggaggccatcaacagtgactttgagggaaatcccctacacaactgcttggtagcatcagaaaatgggattgcccctgtgccttggaccaagataaccagcccagagtttgtggatgacagaccccaagtagtgaatgccctctgccaagcctgggggccccttccattagaggcactggatttgagcagccctcaagagttgcaccaggccagctccccagacaaccaggtgcttcctgcccagagtttggccaagggtaagggcaggacatatgggagcaagtatccaggactcatcaaggtggagcaagcccggtgtggggaggtggctttcaggatggacgaggtggtcagccaggacttcgagggagactatgtggctctcctaggcttttcccaagagagcagaggagagtctcccagtagggaggcaggcacatccagtgggtgtacttctggggcactagaggagatagctggaactaaggaaactcccttatttcaaaagatactgcctctctcagaggccaatgaaggaccttccttgggaaatcgggcttgcacaaagccagaaagctctgaggagaggccctataatttgggcttcaggagaaaggtcaatcttaaagcacccacccacaactcagaaaggccgccccaaggctcctacatgaatgtccttgaggacgcactggactgtgcctctggtctcagggcaggtgtctcacaagagccagctgcctccaagatgcagggacctctaggaaacccagagaatatggtgcagctcaggcctggaccaagacaagcctcctctccccgcctgtccccagcttctcctgcagctgcagcctctgaaacaaagatagaggtgaagaccaaagagagaaatgggagacttcccaagcccatgccctgccctagcagaaacacctcctcccctgagccccccactcctgggctcaaattctcattcttgagagggcagaggcaaccctctgtgaccccggagaaagcctcactccagcacaatgggccctggaaagtcctgtgttccctctactctcctaaacccaaccgagccaaatctttggggaaagctggaacaactcagaccaaaacatctggcccagccactgcccccagcccactgactgaggaaaaggctgccttgccagaagcttctgcaggctccccagaaagaggccccaccctggaggaggagcccccagggcctgagcccaggattggggctctaggtgtcaaggttttccgctccaggatagcatgcctgccaggtggccgggacagggccgggcggcccctgcttctggtgtcaactacagagggggcctgggaggcaccatggtgcacagtttcagaggtcaccaagctactgtcctacctgtgtaccatccccaggcctgaagataaagccaaggggctggcggtcctgattgacgccaggagacagcccccacagcccggtctggtcagcgccctgcaggccacccaggctcaggtcccagcctctatccgggctattctcttcctgggggagaaggaggcggctctccagctgcagacattacctgacgtccaggtggaggtgctgacctcattgaaggccctcagccaccatgtggaccccagccagctgcccgcagtcctggaaggccccttcccctactgccacaccgagtgggttcatttcttccagaagctggaccctttccttgctgacctccaccaggcctcttccctgctacaagcttccatcgaggaattcgagaaggccgacccccctggggggatgcaggaggctaccaggtgcctgagcaagtccaaggagctgatggaggctgtgctgagggaccccggcctactgggcctccagcgggaaggtggagccaccctggccaggctgcagcatgatgccagcaggctggacttcagccctgatgtcaggagccatctggctgcagccactgccttgtacagccttgtggacgagcagcttcatgttctggtcaccgcttccaacagcctcctggggaagctggagctccgtgtccgcctgggccgcctggaagctgccattcaccaggtcagcgactggatggagcaggaaggaaggcggtgcctgcaatcactgacccccaaggatggaagtttggagacagtggagaaagcccacgcagaatttgagaacttcttcctccaggctgcagcccagtaccgccgaggcctggagctgtccaagcaggccgctcagctgggagctacagccagaggggctggggaggcagaacgtgcagagttcccagagctggcagcctttgcctctacccagcgggccttccaggctgagctgacccacttttacatggcggccgagcggcaacgcacggacctcgagacgctgctccacctgcaccgcttctgcaagaggatgacctggttccacatggactgtcaggacctgatggcccagctcaggctggacaagacctcaagggtcagtcctggggaccagcgccgcctccaccgctacctgcagcgactggcatctgagttccctgctgagaagctcgcagccgtggggctgcaggtggcctccctgagccgggcaggcctgggccaggagctatgggaggaggcccggatcaggcatgaggagatccggatgctcctggagaaggcactgacccacagctcttgcccagaggctccagctgctcactcagcgcgcccagaacgaagaggggtggcagccaagggccagggtgtgagtgtagaggtcacttccaaggggaggtgggatcagcctccactagactcactgggcatggaccatttgccaaagtcctattggcctcctgggccccccagaggggaacagaacagaactttccaggcaggctctccaccccaggaagctggccaggctgcagaggctgaagacggcaaaggctcccacaagctgcctgaccctgcccgcgagcatttgcttgccaccaccttcttccggcagcagccccccaggcagagccaggtccctcgcctcactgggggcagcttctcctcagaggggacagactcacagacatcccttgaggactcaccccagacaagtccccttgcctccctctagctgagaggccccttcagtcgcaccagcctccaggagcactgggccagggcccagctggaggggtagctgggagctctggtcagtcccagtgagacgtcaccatggagcactggttttacattctgcctctgctgggaggatgagaactgtcgacctgcccctggctccagaaaactcctggaagacccgatcttcacccatgcagaatagcaagagtgggcgtcagaaccagggcacaataaatggtgtgattggctccatccctccaggctctcattgtggaaagacctgtcggcacagacccctccagaggtctcgctcgcaggcaggcagacacccacctgcagctcaggaacatacacagctctcccctcgggtacgagggccagtgttgcccttaggcagaatcctcggggagattcgggagtgcttccttgtcttggattccaggaaaatggaccctgagatgaggatttaaggatcagtgtgtttggtgctgatccaggaacctctgctgggggagtaggaggcgaatctgcaaagggaataaagagtatgttgtcaagcaaattttcttttttttaatttttaaaacttcattgtattttatgtttagagatggggcctcactacattgcccaggctggtctcaaactcctgggctcaagtgatcctcttgccttggcctgccaaagtgctgggattgccttttccgcccaccccccccgaccccaccagagacagggtctcactctggtgtccaggctggagtgcagtggtgcaatcatagccttaaattcctgggttcaaccaatcctcccacctcagcctcctaagtagctgggactacagttatgcaccaccatgctcagcttattatttatttattttttgtagacatggggtcttgctatgttgcccaggcaggctgatctcaagctcaagtgatcctctggactcagcctcccaaagtgctgggattatacgtatgagccactgtgccccaccctcatacaaatttccatgttggcaactgtagctggatctttctggagatctctgaaagacagcatggaatccttgaacaccccctgaggcgtgaggcatccagagcatttatctgccaaccctcaggagctggcactcgtagacagcacgcacagccagctccattggtcttggcaaagagaattgcctcctggagccagaggccggttcctgtgcttagaaaggaaggacatgtcttctgtgctccctgtctcacaaggcctcttcagcaggcatgggaccttcattctcaagttcaaggaaccctgtggaaccttgtccttgtcctccagagagaatcctctccgccttagaggtccctcctctctctcacctccccaccaagcctccctgaactcaatgtcttctgtccccttccctgcccaacttccacttctctatgcccagcctctgtggcccagtaccattggggttctgtgggcagctgggtcctggtggttggggaccgtgggaaggggcctatctgtcggatcttagatggagcatccagaagccccacccttcatactggccagagtggcccctgccagcgcctctctggagtgtcattaagctgaaagtgtttgccttacctctgcagtaggatgcattactgaagtggcctcttggtcacctagctctgaattttcctggctccagaaagaggctgtggggcacaggtcccccacaatgaggctgtgaaggggagagaggcaggcctgggccaggcacaggaggacaactagggcttctcaggagctgtctcagccaagagtcacacacttgatacctaaaatggcttcaggaatcttccaagactgaagacttccccaggtgtggtctagggcctgcctgcctcagagccatgagcagagccggtcaaaaggcttcctagggaatcctaccccagacattaaaatagactcttggtgctggcaggtggctggaatctgcgtttgtagccaagtgctcttcctgtgtgactcagcaaagtgggggtgcatttggggaacacccggggctggggcctgagtcctccacccaaagccaggtttgattcttgcattcccctccctgccttccatccagacaggcccaaagatgcaagaggcgttgatcagcccatctccatccatgcctgttgcctcagagagggccgacggcttttaaaatgctgttgccatagcaacagcatccagccagtgggtaccacaggcagggagccacagaaactggggtgctgggatggaaactgacttgtgagagaccacagctactgctagaaggaaggggggcaaagcgggcacaggtaatctaagaatacttgggcgggaggagtccccaaggttaccttgtgcatccctctgtccccagaaagaactgtaccccaacaatctctcccctcactgcatcccctggggaagaagggaatgcagaaatgaaatgtcataatgagtaacaatgtataaaaatatcgaataataacagct

SEQ ID NO: 5767 - protein, 1081 aa, Homo sapiens
MIKCLSLDLCTVDKKPVPEPAYPILFTQEWLEAINSDFEGNPLHNCLVASENGIAPVPWTKITSPEFVDDRPQVVNALCQAWGPLPLEALDLSSPQELHQASSPDNQVLPAQSLAKGKGRTYGSKYPGLIKVEQARCGEVAFRMDEVVSQDFEGDYVALLGFSQESRGESPSREAGTSSGCTSGALEEIAGTKETPLFQKILPLSEANEGPSLGNRACTKPESSEERPYNLGFRRKVNLKAPTHNSERPPQGSYMNVLEDALDCASGLRAGVSQEPAASKMQGPLGNPENMVQLRPGPRQASSPRLSPASPAAAASETKIEVKTKERNGRLPKPMPCPSRNTSSPEPPTPGLKFSFLRGQRQPSVTPEKASLQHNGPWKVLCSLYSPKPNRAKSLGKAGTTQTKTSGPATAPSPLTEEKAALPEASAGSPERGPTLEEEPPGPEPRIGALGVKVFRSRIACLPGGRDRAGRPLLLVSTTEGAWEAPWCTVSEVTKLLSYLCTIPRPEDKAKGLAVLIDARRQPPQPGLVSALQATQAQVPASIRAILFLGEKEAALQLQTLPDVQVEVLTSLKALSHHVDPSQLPAVLEGPFPYCHTEWVHFFQKLDPFLADLHQASSLLQASIEEFEKADPPGGMQEATRCLSKSKELMEAVLRDPGLLGLQREGGATLARLQHDASRLDFSPDVRSHLAAATALYSLVDEQLHVLVTASNSLLGKLELRVRLGRLEAAIHQVSDWMEQEGRRCLQSLTPKDGSLETVEKAHAEFENFFLQAAAQYRRGLELSKQAAQLGATARGAGEAERAEFPELAAFASTQRAFQAELTHFYMAAERQRTDLETLLHLHRFCKRMTWFHMDCQDLMAQLRLDKTSRVSPGDQRRLHRYLQRLASEFPAEKLAAVGLQVASLSRAGLGQELWEEARIRHEEIRMLLEKALTHSSCPEAPAAHSARPERRGVAAKGQGVSVEVTSKGRWDQPPLDSLGMDHLPKSYWPPGPPRGEQNRTFQAGSPPQEAGQAAEAEDGKGSHKLPDPAREHLLATTFFRQQPPRQSQVPRLTGGSFSSEGTDSQTSLEDSPQTSPLASL

SEQ ID NO: 5768 - DNA, 1811 bp, Homo sapiens
aggccttgaggttttggcagctctggaggatgagagagaacatggccaggggcccttgcaacgcgccgagatgggcgtccctgatggtgctggtcgccataggcaccgccgtgacagcggccgtcaaccctggcgtcgtggtcaggatctcccagaagggcctggactacgccagccagcaggggacggccgctctgcagaaggagctgaagaggatcaagattcctgactactcagacagctttaagatcaagcatcttgggaaggggcattatagcttctacagcatggacatccgtgaattccagcttcccagttcccagataagcatggtgcccaatgtgggccttaagttctccatcagcaacgccaatatcaagatcagcgggaaatggaaggcacaaaagagattcttaaaaatgagcggcaattttgacctgagcatagaaggcatgtccatttcggctgatctgaagctgggcagtaaccccacgtcaggcaagcccaccatcacctgctccagctgcagcagccacatcaacagtgtccacgtgcacatctcaaagagcaaagtggggtggctgatccaactcttccacaaaaaaattgagtctgcgcttcgaaacaagatgaacagccaggtctgcgagaaagtgaccaattctgtatcctccgagctgcaaccttatttccagactctgccagtaatgaccaaaatagattctgtggctggaatcaactatggtctggtggcacctccagcaaccacggctgagaccctggatgtacagatgaagggggagttttacagtgagaaccaccacaatccacctccctttgctccaccagtgatggagtttcccgctgcccatgaccgcatggtatacctgggcctctcagactacttcttcaacacagccgggcttgtataccaagaggctggggtcttgaagatgacccttagagatgacatgattccaaaggagtccaaatttcgactgacaaccaagttctttggaaccttcctacctgaggtggccaagaagtttcccaacatgaagatacagatccatgtctcagcctccaccccgccacacctgtctgtgcagcccaccggccttaccttctaccctgccgtggatgtccaggcctttgccgtcctccccaactcctccctggcttccctcttcctgattggcagcacacaactggttccatggaggtcagcgccgagtccaacaggcttgttggagagctcaagctggataggctgctcctggaactgaagcactcaaatattggccccttcccggttgaattgctgcaggatatcatgaactacattgtacccattcttgtgctgcccagggttaacgagaaactacagaaaggcttccctctcccgacgccggccagagtccagctctacaacgtagtgcttcagcctcaccagaacttcctgctgttcggtgcagacgttgtctataaatgaaggcaccaggggtgccgggggctgtcagccacacctgttcctgatgggctgtggggcaccggctgcctttccccagggaatcctctccagatcttaaccaagagccccttgcaaacttcttcgactcagattcagaaatgatctaaacacgaggaaacattattcattggaaaagtgcatggtgtgtattttagggattatgagcttctttcaagggctaaggctgcagagatatttcctccaggaatcgtgtttcaattgtaaccaagaaatttccatttgtgcttcatgaaaaaaaacttctggtttttttcatgtg

SEQ ID NO: 5769 - DNA, 2187 bp, Homo sapiens
gcgctccaagatggcggcgaacgtgttcccgttccgcgacgcccgtgccgcaccggacccagtgctggaggccggcccggtggcacacgggccactgccggtaccgctggtgctggacaacgggtcgttccaagtccgcgctggctgggcgtgtcccgggcaggacccaggtcccgagccgcgcctgcagttccgcgcggtgtgcgcccgcggtcgtggcggggcacggggcgcgtcgggcccgcaggtggggaacgctctgggcagcctggagccactgcgctggatgctgcgctcgcccttcgaccgcaacgtgccggtcaacctggagcttcaggagttgctgctggactacagcttccagcacctgggtgtctcctcacagggctgtgttgatcatcccatagttttgacagaagctgtgtgcaacccactgtattcacggcaaatgatgtctgagcttctttttgagtgctacgggattcccaaggttgcctatggaatagacagcctcttcagcttctaccacaataagccaaagaactcgatgtgcagtgggctaatcatttcatctggataccagtgtacgcatgttttacccatcttagaagggagattagatgctaaaaactgcaagcgcatcaatcttggaggaagccaagcagctggttacctccagcgtctcctccagctgaagtaccctgggcacctggcagccatcaccctcagccgcatggaggagattctgcatgagcacagctacatcgctgaggattatgtggaagaattacacaaatggcggtgtcctgattattatgagaataatgtccacaagatgcagctcccattttccagcaagctcctgggcagcactctgacctctgaggagaaacaagaaaggcggcagcagcaattgcggcggctgcaggagctcaatgcccggcggcgggaggagaagctgcagctggatcaggagcgtctggaccgactgctatatgtgcaggaacttctagaggatggccagatggatcagtttcacaaagctctgatagagctgaatatggactccccagaagagctgcagtcctacatccagaagctcagtatagcagtggagcaggctaagcagaaaatcctccaagcggaagtcaacctcgaggtggatgtggtagacagcaagccagagacccctgacctggagcagctggagccgtctttggaagatgtggaaagcatgaatgattttgatcccttgttttcagaggaaacacctggagtggagaagccggtcaccactgttcagcccgtgtttaacttggcagcatatcatcagctatttgttgggacagaaagaattcgagctccagagattattttccagccatctctcataggagaagaacaggctgggattgcagagactcttcagtacattctggacaggtacccagaggacattcaggaaatgctggttcagaacgttttcctcactggcggcaacacgatgtatcctggcatgaaagccagaatggagaaggaactgttggagatgagacccttccggtcttcttttcaggttcaacttgcctcgaaccctgtgctggatgcctggtacggtgctcgtgactgggccttgaaccacctagatgataatgaagtttggatcaccaggaaagagtatgaagaaaagggaggagagtacctcaaggagcactgtgcttccaacatctatgtccccatccgcctgccgaagcaggcctcccgctcctcagatgcccaggcatccagcaagggctccgctgctggtggaggtggtgctggtgagcaggcatagcagaggccctccagagagactgccctgcacgccatgccttgggccacgttggcagtgtgacaggactgtgattgtgctagatgtacctgcccaagtctgctggtcacatttggcagcaaaatggatttctcctggggagaacaaagttaagggacactgagacctgcccttcagaattcggttcacttgggggcttctgtggtagagactaactggccttctgatgtctttgttcaactgtggccagctgtggcatcagcttcctggagcagtaaatgaagacagagtggaggacacaaatgtacaaaatgcacaagactgatttcttaccacattttagtctttcttgtttt

SEQ ID NO: 5770 - protein, 607 aa, Homo sapiens
MAANVFPFRDARAAPDPVLEAGPVAHGPLPVPLVLDNGSFQVRAGWACPGQDPGPEPRLQFRAVCARGRGGARGASGPQVGNALGSLEPLRWMLRSPFDRNVPVNLELQELLLDYSFQHLGVSSQGCVDHPIVLTEAVCNPLYSRQMMSELLFECYGIPKVAYGIDSLFSFYHNKPKNSMCSGLIISSGYQCTHVLPILEGRLDAKNCKRINLGGSQAAGYLQRLLQLKYPGHLAAITLSRMEEILHEHSYIAEDYVEELHKWRCPDYYENNVHKMQLPFSSKLLGSTLTSEEKQERRQQQLRRLQELNARRREEKLQLDQERLDRLLYVQELLEDGQMDQFHKALIELNMDSPEELQSYIQKLSIAVEQAKQKILQAEVNLEVDVVDSKPETPDLEQLEPSLEDVESMNDFDPLFSEETPGVEKPVTTVQPVFNLAAYHQLFVGTERIRAPEIIFQPSLIGEEQAGIAETLQYILDRYPEDIQEMLVQNVFLTGGNTMYPGMKARMEKELLEMRPFRSSFQVQLASNPVLDAWYGARDWALNHLDDNEVWITRKEYEEKGGEYLKEHCASNIYVPIRLPKQASRSSDAQASSKGSAAGGGGAGEQA

SEQ ID NO: 5771 - DNA, 4408 bp, Homo sapiens
ggggtgccgccgccgccgttgcgcttgctcccgggcggtcctggcctgtgccgccgccgcccccagcgtcggagccatggcgggcgccgcgtccccttgcgccaacggctgcgggcccggcgcgccctcggacgccgaggtgctgcacctctgccgcagcctcgaggtgggcaccgtcatgactttgttctactccaagaagtcgcagcgacccgagcggaagaccttccaggtcaagctggagacgcgccagatcacgtggagccggggcgccgacaagatcgagggggccattgacattcgtgaaattaaggagatccgcccagggaagacctcacgggactttgatcgctatcaagaggacccagctttccggccggaccagtcacattgctttgtcattctctatggaatggaatttcgcctgaaaacgctgagcctgcaagccacatctgaggatgaagtgaacatgtggatcaagggcttaacttggctgatggaggatacattgcaggcacccacacccctgcagattgagaggtggctccggaagcagttttactcagtggatcggaatcgtgaggatcgtatatcagccaaggacctgaagaacatgctgtcccaggtcaactaccgggtccccaacatgcgcttcctccgagagcggctgacggacctggagcagcgcagcggggacatcacctacgggcagtttgctcagctgtaccgcagcctcatgtacagcgcccagaagacgatggacctccccttcttggaagccagtactctgagggctggggagcggccggagctttgccgagtgtcccttcctgagttccagcagttccttcttgactaccagggggagctgtgggctgttgatcgcctccaggtgcaggagttcatgctcagcttcctccgagaccccttacgagagatcgaggagccatacttcttcctggatgagtttgtcaccttcctgttctccaaagagaacagtgtgtggaactcgcagctggatgcagtatgcccggacaccatgaacaaccctctttcccactactggatctcctcctcgcacaacacgtacctgaccggggaccagttctccagtgagtcctccttggaagcctatgctcgctgcctgcggatgggctgtcgctgcattgagttggactgctgggacggcccggatgggatgccagttatttaccatgggcacacccttaccaccaagatcaagttctcagatgtcctgcacaccatcaaggagcatgcctttgtggcctcagagtacccagtcatcctgtccattgaggaccactgcagcattgcccagcagagaaacatggcccaatacttcaagaaggtgctgggggacacactcctcaccaagcccgtggagatctctgccgacgggctcccctcacccaaccagcttaagaggaagatcctcatcaagcacaagaagctggctgagggcagtgcctacgaggaggtgcctacatccatgatgtactctgagaacgacatcagcaactctatcaagaatggcatcctctacctggaggaccctgtgaaccacgaatggtatccccactactttgttctgaccagcagcaagatctactactctgaggagaccagcagtgaccagggcaacgaggatgaggaggagcccaaggaggtcagcagcagcacagagctgcactccaatgagaagtggttccatgggaagctaggggcagggcgtgacgggcgtcacatcgctgagcgcctgcttactgagtactgcatcgagaccggagcccctgacggctccttcctcgtgcgagagagtgagaccttcgtgggcgactacacgctctctttctggcggaacgggaaagtccagcactgccgtatccactcccggcaagatgctgggacccccaagttcttcttgacagacaacctcgtctttgactccctctatgacctcatcacgcactaccagcaggtgcccctgcgctgtaatgagtttgagatgcgactttcagagcctgtcccacagaccaacgcccacgagagcaaagagtggtaccacgcgagcctgaccagagcacaggctgagcacatgctaatgcgcgtccctcgtgatggggccttcctggtgcggaagcggaatgaacccaactcatatgccatctctttccgggctgagggcaagatcaagcattgccgtgtccagcaagagggccagacagtgatgctagggaactcggagttcgacagccttgttgacctcatcagctactatgagaaacacccgctataccgcaagatgaagctgcgctatcccatcaacgaggaggcactggagaagattggcacagctgagcctgactacggggccctgtatgagggacgcaaccctggcttctatgtagaggcaaaccctatgccaactttcaagtgtgcagtcaaagccctctttgactacaaggcccagagggaggacgagctgaccttcatcaagagcgccatcatccagaatgtggagaagcaagagggaggctggtggcgaggggactacggagggaagaagcagctgtggttcccatcaaactacgtggaagagatggtcaaccccgtggccctggagccggagagggagcacttggacgagaacagccccctaggggacttgctgcggggggtcttggatgtgccggcttgtcagattgccatccgtcctgagggcaagaacaaccggctcttcgtcttctccatcagcatggcgtcggtggcccactggtccctggatgttgctgccgactcacaggaggagctgcaggactgggtgaaaaagatccgtgaagtggcccagacagcagacgccaggctcactgaagggaagataatggaacggaggaagaagattgccctggagctctctgaacttgtcgtctactgccggcctgttccctttgatgaagagaagattggcacagaacgtgcttgctaccgggacatgtcatccttcccggaaaccaaggctgagaaatacgtgaacaaggccaaaggcaagaagttccttcagtacaatcgactgcagctctcccgcatctaccccaagggccagcgactggattcctccaactacgatcctttgcccatgtggatctgtggcagtcagcttgtggccctcaacttccagacccctgacaagcctatgcagatgaaccaggccctcttcatgacgggcaggcactgtggctacgtgctgcagccaagcaccatgcgggatgaggccttcgacccctttgacaagagcagcctccgcgggctggagccatgtgccatctctattgaggtgctgggggcccgacatctgccaaagaatggccgaggcattgtgtgtccttttgtggagattgaggtggctggagctgagtatgacagcaccaagcagaagacagagtttgtggtggacaatggactcaaccctgtatggccagccaagcccttccacttccagatcagtaaccctgaatttgcctttctgcgcttcgtggtgtatgaggaagacatgtttagtgaccagaatttcctggctcaggctactttcccagtaaaaggcctgaagacaggatacagagcagtgcctttgaagaacaactacagtgaggacctggagttggcctccctgctgatcaagattgacattttccctgccaaggagaatggtgacctcagtcccttcagtggtacgtccctgcgggagcggggctcagatgcctcaggccagctgtttcatggccgagcccgggaaggctcctttgaatcccgctaccagcagccgtttgaggacttccgcatctcccaggagcatctcgcagaccattttgacagtcgagaacgaagggccccaagaaggactcgggtcaatggagacaaccgcctctagttgtaccccagcctcgttggagagcagcaggtgctgtgcgccttgtagaatgccgcgaactgggttctttggaagcagccccctgtggcggccttccgggtctcgcagcctgaagcctggattccagcagtgaatgctagacagaaaccaagccattaatgagatgttattactgttttgggcctccatgccccagctctggatgaaggcaaaaactgtactgtgtttcgcattaagcacacacatctggccctgacttctggagatggatccttccatcttgtggggccaggaccatggccgaagccccttggagagagaggctgcctcagccagtggcacaggagactccaaggagctactgacattcctaagagtggaggaggaggaggagccttgctgggccagggaaacaaagtttacattgtcctgtagctttaaaaccacagctgggcaggg

SEQ ID NO: 5772 - protein, 1290 aa, Homo sapiens
MAGAASPCANGCGPGAPSDAEVLHLCRSLEVGTVMTLFYSKKSQRPERKTFQVKLETRQITWSRGADKIEGAIDIREIKEIRPGKTSRDFDRYQEDPAFRPDQSHCFVILYGMEFRLKTLSLQATSEDEVNMWIKGLTWLMEDTLQAPTPLQIERWLRKQFYSVDRNREDRISAKDLKNMLSQVNYRVPNMRFLRERLTDLEQRSGDITYGQFAQLYRSLMYSAQKTMDLPFLEASTLRAGERPELCRVSLPEFQQFLLDYQGELWAVDRLQVQEFMLSFLRDPLREIEEPYFFLDEFVTFLFSKENSVWNSQLDAVCPDTMNNPLSHYWISSSHNTYLTGDQFSSESSLEAYARCLRMGCRCIELDCWDGPDGMPVIYHGHTLTTKIKFSDVLHTIKEHAFVASEYPVILSIEDHCSIAQQRNMAQYFKKVLGDTLLTKPVEISADGLPSPNQLKRKILIKHKKLAEGSAYEEVPTSMMYSENDISNSIKNGILYLEDPVNHEWYPHYFVLTSSKIYYSEETSSDQGNEDEEEPKEVSSSTELHSNEKWFHGKLGAGRDGRHIAERLLTEYCIETGAPDGSFLVRESETFVGDYTLSFWRNGKVQHCRIHSRQDAGTPKFFLTDNLVFDSLYDLITHYQQVPLRCNEFEMRLSEPVPQTNAHESKEWYHASLTRAQAEHMLMRVPRDGAFLVRKRNEPNSYAISFRAEGKIKHCRVQQEGQTVMLGNSEFDSLVDLISYYEKHPLYRKMKLRYPINEEALEKIGTAEPDYGALYEGRNPGFYVEANPMPTFKCAVKALFDYKAQREDELTFIKSAIIQNVEKQEGGWWRGDYGGKKQLWFPSNYVEEMVNPVALEPEREHLDENSPLGDLLRGVLDVPACQIAIRPEGKNNRLFVFSISMASVAHWSLDVAADSQEELQDWVKKIREVAQTADARLTEGKIMERRKKIALELSELVVYCRPVPFDEEKIGTERACYRDMSSFPETKAEKYVNKAKGKKFLQYNRLQLSRIYPKGQRLDSSNYDPLPMWICGSQLVALNFQTPDKPMQMNQALFMTGRHCGYVLQPSTMRDEAFDPFDKSSLRGLEPCAISIEVLGARHLPKNGRGIVCPFVEIEVAGAEYDSTKQKTEFVVDNGLNPVWPAKPFHFQISNPEFAFLRFVVYEEDMFSDQNFLAQATFPVKGLKTGYRAVPLKNNYSEDLELASLLIKIDIFPAKENGDLSPFSGTSLRERGSDASGQLFHGRAREGSFESRYQQPFEDFRISQEHLADHFDSRERRAPRRTRVNGDNRL

SEQ ID NO: 5773 - DNA, 948 bp, Homo sapiens
taagagtcatcacttctgctgagtaggcaaaacaatgaactataacaacagacatcattttctttccttaaattctgaggtttatgctggaaaaataaacccatttctttataaacatctaattaaataaagtatcaaagaaaataagataatggaagaagcatccgccttttggggcactatattcctaaggttgggctttaagattttttaacaggaaacccaggaatttctgaaaaacaaggcctttttcacattaccaagaactcacagctactctgtgaatgccctagatatttgactcaaatttttcactcaatcttattaggtatatttctggattatttgaatctacaaaccaaccctagaatatcatgctttccagtcacacctgtggcacaatgagcagtgtacgaccatgccccatcacaatccaacccttggtaccctacattgtgacacctcctagaaaggtattaaagctgagccaattaatctatattttgatttcagactaagattaataaatgcttttaaataaagtaacttttaaggtatctgaacaaagggatgtaaggttaattcacttctcaaactgcaatttcaactcatcaggcttatggatgtatggactaattgctaacctagtaactcctacaaatttgcagtattcaaagcgtttacccatttcactgtttttcaaaccaattacacaaagcattaaaatttacaagtatgatctaaccaattatcaaataatcccactaactacaaaggggactgactactgggtggaacttaactggcaactgactttactgagattaagtgcctgttaaacataatgatctttcagcagaaaatgcagtatgtgcttttacactttgaataaactcaatttcagaacaaaaagaggctacttccatttccacatgacaaacattaaag

SEQ ID NO: 5774 - DNA, 2627 bp, Homo sapiens
gctgacgccttcgagcgcggcccggggcccggagcggccggagcagcccgggtcctgaccccggcccggctcccgctccgggctctgccggcgggcgggcgagcgcggcgcggtccgggccggggggatgtctcggcggacgcgctgcgaggatctggatgagctgcactaccaggacacagattcagatgtgccggagcagagggatagcaagtgcaaggtcaaatggacccatgaggaggacgagcagctgagggccctggtgaggcagtttggacagcaggactggaagttcctggccagccacttccctaaccgcactgaccagcaatgccagtacaggtggctgagagttttgaatccagaccttgtcaaggggccatggaccaaagaggaagaccaaaaagtcatcgagctggttaagaagtatggcacaaagcagtggacactgattgccaagcacctgaagggccggctggggaagcagtgccgtgaacgctggcacaaccacctcaaccctgaggtgaagaagtcttgctggaccgaggaggaggaccgcatcatctgcgaggcccacaaggtgctgggcaaccgctgggccgagatcgccaagatgttgccagggaggacagacaatgctgtgaagaatcactggaactctaccatcaaaaggaaggtggacacaggaggcttcttgagcgagtccaaagactgcaagcccccagtgtacttgctgctggagctcgaggacaaggacggcctccagagtgcccagcccacggaaggccagggaagtcttctgaccaactggccctccgtccctcctaccataaaggaggaggaaaacagtgaggaggaacttgcagcagccaccacatcgaaggaacaggagcccatcggtacagatctggacgcagtgcgaacaccagagcccttggaggaattcccgaagcgtgaggaccaggaaggctccccaccagaaacgagcctgccttacaagtgggtggtggaggcagctaacctcctcatccccgctgtgggttctagcctctctgaagccctggacttgatcgagtcggaccctgatgcttggtgtgacctgagtaaatttgacctccctgaggaaccatctgcagaggacagtatcaacaacagcctagtgcagctgcaagcgtcacatcagcagcaagtcctgccaccccgccagccttccgccctggtgcccagtgtgaccgagtaccgcctggatggccacaccatctcagacctgagccggagcagccggggcgagctgatccccatctcccccagcactgaagtcgggggctctggcattggcacaccgccctctgtgctcaagcggcagaggaagaggcgtgtggctctgtcccctgtcactgagaatagcaccagtctgtccttcctggattcctgtaacagcctcacgcccaagagcacacctgttaagaccctgcccttctcgccctcccagtttctgaacttctggaacaaacaggacacattggagctggagagcccctcgctgacatccaccccagtgtgcagccagaaggtggtggtcaccacaccactgcaccgggacaagacacccctgcaccagaaacatgctgcgtttgtaaccccagatcagaagtactccatggacaacactccccacacgccaaccccgttcaagaacgccctggagaagtacggacccctgaagcccctgccacagaccccgcacctggaggaggacttgaaggaggtgctgcgttctgaggctggcatcgaactcatcatcgaggacgacatcaggcccgagaagcagaagaggaagcctgggctgcggcggagccccatcaagaaagtccggaagtctctggctcttgacattgtggatgaggatgtgaagctgatgatgtccacactgcccaagtctctatccttgccgacaactgccccttcaaactcttccagcctcaccctgtcaggtatcaaagaagacaacagcttgctcaaccagggcttcttgcaggccaagcccgagaaggcagcagtggcccagaagccccgaagccacttcacgacacctgcccctatgtccagtgcctggaagacggtggcctgcggggggaccagggaccagcttttcatgcaggagaaagcccggcagctcctgggccgcctgaagcccagccacacatctcggaccctcatcttgtcctgaggtgttgagggtgtcacgagcccattctcatgtttacaggggttgtgggggcagagggggtctgtgaatctgagagtcattcaggtgacctcctgcagggagccttctgccaccagcccctccccagactctcaggtggaggcaacagggccatgtgctgccctgttgccgagcccagctgtgggcggctcctggtgctaacaacaaagttccacttccaggtctgcctggttccctccccaaggccacagggagctccgtcagcttctcccaagcccacgtcaggcctggcctcatctcagaccctgcttaggatgggggatgtggccaggggtgctcctgtgctcaccctctcttggtgcatttttttggaagaataaaattgcctctctctttg

SEQ ID NO: 5775 - protein, 700 aa, Homo sapiens
MSRRTRCEDLDELHYQDTDSDVPEQRDSKCKVKWTHEEDEQLRALVRQFGQQDWKFLASHFPNRTDQQCQYRWLRVLNPDLVKGPWTKEEDQKVIELVKKYGTKQWTLIAKHLKGRLGKQCRERWHNHLNPEVKKSCWTEEEDRIICEAHKVLGNRWAEIAKMLPGRTDNAVKNHWNSTIKRKVDTGGFLSESKDCKPPVYLLLELEDKDGLQSAQPTEGQGSLLTNWPSVPPTIKEEENSEEELAAATTSKEQEPIGTDLDAVRTPEPLEEFPKREDQEGSPPETSLPYKWVVEAANLLIPAVGSSLSEALDLIESDPDAWCDLSKFDLPEEPSAEDSINNSLVQLQASHQQQVLPPRQPSALVPSVTEYRLDGHTISDLSRSSRGELIPISPSTEVGGSGIGTPPSVLKRQRKRRVALSPVTENSTSLSFLDSCNSLTPKSTPVKTLPFSPSQFLNFWNKQDTLELESPSLTSTPVCSQKVVVTTPLHRDKTPLHQKHAAFVTPDQKYSMDNTPHTPTPFKNALEKYGPLKPLPQTPHLEEDLKEVLRSEAGIELIIEDDIRPEKQKRKPGLRRSPIKKVRKSLALDIVDEDVKLMMSTLPKSLSLPTTAPSNSSSLTLSGIKEDNSLLNQGFLQAKPEKAAVAQKPRSHFTTPAPMSSAWKTVACGGTRDQLFMQEKARQLLGRLKPSHTSRTLILS

SEQ ID NO: 5776 - DNA, 1498 bp, Homo sapiens
accgctggccccagggaaagccgagcggccaccgagccggcagagacccaccgagcggcggcggagggagcagcgccggggcgcacgagggcaccatggcccagacgcccgccttcgacaagcccaaagtgaaactgcatgtccacctagacggatccatcaagcctgaaaccatcttatactatggcaggaggagagggatcgccctcccagctaacacagcagaggggctgctgaacgtcattggcatggacaagccgctcacccttccagacttcctggccaagtttgactactacatgcctgctatcgcgggctgccgggaggctatcaaaaggatcgcctatgagtttgtagagatgaaggccaaagagggcgtggtgtatgtggaggtgcggtacagtccgcacctgctggccaactccaaagtggagccaatcccctggaaccaggctgaaggggacctcaccccagacgaggtggtggccctagtgggccagggcctgcaggagggggagcgagacttcggggtcaaggcccggtccatcctgtgctgcatgcgccaccagcccaactggtcccccaaggtggtggagctgtgtaagaagtaccagcagcagaccgtggtagccattgacctggctggagatgagaccatcccaggaagcagcctcttgcctggacatgtccaggcctaccaggaggctgtgaagagcggcattcaccgtactgtccacgccggggaggtgggctcggccgaagtagtaaaagaggctgtggacatactcaagacagagcggctgggacacggctaccacaccctggaagaccaggccctttataacaggctgcggcaggaaaacatgcacttcgagatctgcccctggtccagctacctcactggtgcctggaagccggacacggagcatgcagtcattcggctcaaaaatgaccaggctaactactcgctcaacacagatgacccgctcatcttcaagtccaccctggacactgattaccagatgaccaaacgggacatgggctttactgaagaggagtttaaaaggctgaacatcaatgcggccaaatctagtttcctcccagaagatgaaaagagggagcttctcgacctgctctataaagcctatgggatgccaccttcagcctctgcagggcagaacctctgaagacgccactcctccaagccttcaccctgtggagtcaccccaactctgtggggctgagcaacatttttacatttattccttccaagaagaccatgatctcaatagtcagttactgatgctcctgaaccctatgtgtccatttctgcacacacgtatacctcggcatggccgcgtcacttctctgattatgtgccctggccagggaccagcgcccttgcacatgggcatggttgaatctgaaaccctccttctgtggcaacttgtactgaaaatctggtgctcaataaagaagcccatggctggtggcatgc

SEQ ID NO: 5777 - protein, 363 aa, Homo sapiens
MAQTPAFDKPKVKLHVHLDGSIKPETILYYGRRRGIALPANTAEGLLNVIGMDKPLTLPDFLAKFDYYMPAIAGCREAIKRIAYEFVEMKAKEGVVYVEVRYSPHLLANSKVEPIPWNQAEGDLTPDEVVALVGQGLQEGERDFGVKARSILCCMRHQPNWSPKVVELCKKYQQQTVVAIDLAGDETIPGSSLLPGHVQAYQEAVKSGIHRTVHAGEVGSAEVVKEAVDILKTERLGHGYHTLEDQALYNRLRQENMHFEICPWSSYLTGAWKPDTEHAVIRLKNDQANYSLNTDDPLIFKSTLDTDYQMTKRDMGFTEEEFKRLNINAAKSSFLPEDEKRELLDLLYKAYGMPPSASAGQNL

SEQ ID NO: 5778 - DNA, 2017 bp, Homo sapiens
gttcgctgttgggcggagatattcgccgccggcgcttgcgcccggaaggtgtgccgcaccacacgggggaggaaggaaggagctcccaactcgccggcctggccacgggatggcccccaaattcccagactctgtggaggagctccgcgccgccggcaatgagagtttccgcaacggccagtacgccgaggcctccgcgctctacggccgcgcgctgcgggtgctgcaggcgcaaggttcttcagacccagaagaagaaagtgttctctactccaaccgagcagcatgtcacttgaaggatggaaactgcagagactgcatcaaagattgcacttcagcactggccttggttcccttcagcattaagcccctgctgcggcgagcatctgcttatgaggctctggagaagtaccctatggcctatgttgactataagactgtgctgcagattgatgataatgtgacgtcagccgtagaaggcatcaacagaatgaccagagctctcatggactcgcttgggcctgagtggcgcctgaagctgccctcaatccccttggtgcctgtttcagctcagaagaggtggaattccttgccttcggagaaccacaaagagatggctaaaagcaaatccaaagaaaccacagctacaaagaacagagtgccttctgctggggatgtggagaaagccagagttctgaaggaagaaggcaatgagcttgtaaagaagggaaaccataagaaagctattgagaagtacagtgaaagcctcttgtgtagtaacctggaatctgccacgtacagcaacagagcactctgctatttggtcctgaagcagtacacagaagcagtgaaggactgcacagaagccctcaagctggatggaaagaacgtgaaggcattctacagacgggctcaagcccacaaagcactcaaggactataaatccagctttgcagacatcagcaacctcctacagattgagcctaggaatggtcctgcacagaagttgcggcaggaagtgaagcagaacctacactaaaaacccaacagggcaactggaacccctgcctgaccttacccagagaagccatgggccacctgctctgtgcccgctcctgaaacccagcatgccccaagtgagctctgaagccccctcctcaatcccttgatggcctcccaccctgtaagaggctttgcttgttcaaattaaactcagtgtagtcaaacacagacatggttgttgcaccagaaaggtccccactagagctaagcgtgaagctgaagctctgtccctattcccccagcccagctagctgatcacaccaacagatcctcatcagcaaagcatttggctttgtcctgcccaagtgggctgcagactgagtgctgcccttgtagcttccccagaccccaactcactgcagttcatctgaacaacctgagctcctgggccggggtggaaggagggggataaacctaaggccctgatccaaagcagcctgttgagctggttctccagggctgcagtctctccaggtgtacagctgctgtccctgccctgtcctgtccttgcacagtctcctatgtctgagccccagtgccttctgttcgggccctcctttggtgggaaggcagagccctgacccttgaatggttgtccttgactctgtgctgctgccttctgcagagaggcacctaagctgtttaaagagcccagtgattgtggctgctcctcctagaggtgggagggggcaagaggcctccttggtcagtgtccatgctttctgggcagggacttggttttttgttccaacagtggccttctccgggcttcatagttctttgtaatatgttgaagttaatttgaattgactgattttgttgaactgtgtgtttaagctgttgcattaaaaagctttcttctacatcaatatctgctgtgctttcatttatgccttttcagctttgcacctggaactctgtagtaataataaaagttattgcttattgggcattc

SEQ ID NO: 5779 - DNA, 631 bp, Homo sapiens
caatacagctaaggaattatcccttgtaaataccacagacccgccctggagccaggccaagctggactgcataaagattggtatggccttagctcttagccaaacaccttcctgacaccatgagggccagcagcttcttgatcgtggtggtgttcctcatcgctgggacgctggttctagaggcagctgtcacgggagttcctgttaaaggtcaagacactgtcaaaggccgtgttccattcaatggacaagatcccgttaaaggacaagtttcagttaaaggtcaagataaagtcaaagcgcaagagccagtcaaaggtccagtctccactaagcctggctcctgccccattatcttgatccggtgcgccatgttgaatccccctaaccgctgcttgaaagatactgactgcccaggaatcaagaagtgctgtgaaggctcttgcgggatggcctgtttcgttccccagtgaagggagccggtccttgctgcacctgtgccgtccccagagctacaggccccatctggtcctaagtccctgctgcccttccccttcccacactgtccattcttcctcccattcaggatgcccacggctggagctgcctctctcatccactttccaataaa

SEQ ID NO: 5780 - protein, 117 aa, Homo sapiens
MRASSFLIVVVFLIAGTLVLEAAVTGVPVKGQDTVKGRVPFNGQDPVKGQVSVKGQDKVKAQEPVKGPVSTKPGSCPIILIRCAMLNPPNRCLKDTDCPGIKKCCEGSCGMACFVPQ

SEQ ID NO: 5781 - DNA, 598 bp, Homo sapiens
cagagtcactcctgccttcaccatgaagtccagcggcctcttccccttcctggtgctgcttgccctgggaactctggcaccttgggctgtggaaggctctggaaagtccttcaaagctggagtctgtcctcctaagaaatctgcccagtgccttagatacaagaaacctgagtgccagagtgactggcagtgtccagggaagaagagatgttgtcctgacacttgtggcatcaaatgcctggatcctgttgacaccccaaacccaacaaggaggaagcctgggaagtgcccagtgacttatggccaatgtttgatgcttaacccccccaatttctgtgagatggatggccagtgcaagcgtgacttgaagtgttgcatgggcatgtgtgggaaatcctgcgtttcccctgtgaaagcttgattcctgccatatggaggaggctctggagtcctgctctgtgtggtccaggtcctttccaccctgagacttggctccaccactgatatcctcctttggggaaaggcttggcacacagcaggctttcaagaagtgccagttgatcaatgaataaataaacgagcctatttctctttgcac

SEQ ID NO: 5782 - protein, 132 aa, Homo sapiens
MKSSGLFPFLVLLALGTLAPWAVEGSGKSFKAGVCPPKKSAQCLRYKKPECQSDWQCPGKKRCCPDTCGIKCLDPVDTPNPTRRKPGKCPVTYGQCLMLNPPNFCEMDGQCKRDLKCCMGMCGKSCVSPVKA

SEQ ID NO: 5783 - DNA, 2157 bp, Homo sapiens
gcggctatgccgtctggctctgctcgtcctgttgctcctggggcccggcggctggtgccttgcagaacccccacgcgacacctgcgggaggaacttgtcatcaccccgctgccttccggggacgtagccgccacattccagttccgcacgcgctgggattcggagcttcagcgggaaggagtgtcccattacaggctctttcccaaagccctggggcagctgatctccaagtattctctacgggagctgcacctgtcattcacacaaggcttttggaggacccgatactgggggccacccttcctgcaggccccatcaggtgcagagctgtgggtctggttccaagacactgtcactgatgtggataaatcttggaaggagctcagtaatgtcctctcagggatcttctgcgcctctctcaacttcatcgactccaccaacacagtcactcccactgcctccttcaaacccctgggtctggccaatgacactgaccactactttctgcgctatgctgtgctgccgcgggaggtggtctgcaccgaaaacctcaccccctggaagaagctcttgccctgtagttccaaggcaggcctctctgtgctgctgaaggcagatcgcttgttccacaccagctaccactcccaggcagtgcatatccgccctgtttgcagaaatgcacgctgtactagcatctcctgggagctgaggcagaccctgtcagttgtatttgatgccttcatcacggggcagggaaagaaagactggtccctcttccggatgttctcccgaaccctcacggagccctgccccctggcttcagagagccgagtctatgtggacatcaccacctacaaccaggacaacgagacattagaggtgcacccacccccgaccactacatatcaggacgtcatcctaggcactcggaagacctatgccatctatgacttgcttgacaccgccatgatcaacaactctcgaaacctcaacatccagctcaagtggaagagacccccagagaatgaggcccccccagtgcccttcctgcatgcccagcggtacgtgagtggctatgggctgcagaagggggagctgagcacactgctgtacaacacccacccataccgggccttcccggtgctgctgctggacaccgtaccctggtatctgcggctgtatgtgcacaccctcaccatcacctccaagggcaaggagaacaaaccaagttacatccactaccagcctgcccaggaccggctgcaaccccacctcctggagatgctgattcagctgccggccaactcagtcaccaaggtttccatccagtttgagcgggcgctgctgaagtggaccgagtacacgccagatcctaaccatggcttctatgtcagcccatctgtcctcagcgcccttgtgcccagcatggtagcagccaagccagtggactgggaagagagtcccctcttcaacagcctgttcccagtctctgatggctctaactactttgtgcggctctacacggagccgctgctggtgaacctgccgacaccggacttcagcatgccctacaacgtgatctgcctcacgtgcactgtggtggccgtgtgctacggctccttctacaatctcctcacccgaaccttccacatcgaggagccccgcacaggtggcctggccaagcggctggccaaccttatccggcgcgcccgaggtgtccccccactctgattcttgccctttccagcagctgcagctgccgtttctctctggggaggggagcccaagggctgtttctgccacttgctctcctcagagttggcttttgaaccaaagtgccctggaccaggtcagggcctacagctgtgttgtccagtacaggagccacgagccaaatgtggcatttgaatttgaattaacttagaaattcatttcctcacctgtagtggccacctctatattgaggtgctcaataagcaaaagtggtcggtggctgctgtattggacagcacagaaaaagatttccatcaccacagaaaggtcggctggcagcactggccaaggtgatggggtgtgctacacagtgtatgtcactgtgtagtggatggagtttactgtttgtggaataaaaacggctgtttccgtgcaacacaaaaa

SEQ ID NO: 5784 - protein, 574 aa, Homo sapiens [sequence omitted]

SEQ ID NO: 5785 - DNA, 783 bp, Homo sapiens
ggcacgagcgagttcctgtctctctgccaacgccgcccggatggcttcccaaaaccgcgacccagccgccactagcgtcgccgccgcccgtaaaggagctgagccgagcgggggcgccgcccggggtccggtgggcaaaaggctacagcaggagctgatgaccctcatgatgtctggcgataaagggatttctgccttccctgaatcagacaaccttttcaaatgggtagggaccatccatggagcagctggaacagtatatgaagacctgaggtataagctctcgctagagttccccagtggctacccttacaatgcgcccacagtgaagttcctcacgccctgctatcaccccaacgtggacacccagggtaacatatgcctggacatcctgaaggaaaagtggtctgccctgtatgatgtcaggaccattctgctctccatccagagccttctaggagaacccaacattgatagtcccttgaacacacatgctgccgagctctggaaaaaccccacagcttttaagaagtacctgcaagaaacctactcaaagcaggtcaccagccaggagccctgacccaggctgcccagcctgtccttgtgtcgtctttttaatttttccttagatggtctgtcctttttgtgatttctgtataggactctttatcttgagctgtggtatttttgttttgtttttgtcttttaaattaagcctcggttgagcccttgtatattaaataaatgcatttttgtccttttttaaaaaaaaaaaaaaaaaaa

SEQ ID NO: 5786 - protein, 179 aa, Homo sapiens
MASQNRDPAATSVAAARKGAEPSGGAARGPVGKRLQQELMTLMMSGDKGISAFPESDNLFKWVGTIHGAAGTVYEDLRYKLSLEFPSGYPYNAPTVKFLTPCYHPNVDTQGNICLDILKEKWSALYDVRTILLSIQSLLGEPNIDSPLNTHAAELWKNPTAFKKYLQETYSKQVTSQEP

SEQ ID NO: 5787 - DNA, 1600 bp, Homo sapiens
gaacccggccgacctccatgggctgcggggggctgcacccggacccctggggcgcggcgcgcccctgaatgcaccgtgggacgcaggagggtgccatggcctcccggctcctgcaccggctgcggcacgccttggccggcgacggccccggggaggcggcggccagtccagaggccgagcagtttccggagagctcagagctggaggacgacgacgccgagggcctgtcctcccgactcagcggcaccctcagcttcaccagcgccgaggacgacgaggacgacgaggacgaggacgacgaggaggctggccctgaccagctgcccctcggggatgggacgtcaggagaagacgcagaacggagccccccacctgatgggcagtggggcagtcagctcctggcgcggcagctgcaggatttctggaagaagtcccggaacaccttggcaccccagcggctgctcttcgaagtgaccagcgctaacgttgtcaaggacccgccctccaagtacgtgctctacaccctcgccgtgatcggcccaggaccgccagattgccagccagcccagatctctcgccgttactcggactttgagcggctgcaccgaaacctgcagcggcaattccggggcccaatggctgccatctccttcccccgtaagcggctgcgccggaattttactgcagagaccattgcccgccgtagccgggcctttgagcagtttttgggtcacctgcaggcagtgcctgagctgcgccatgccccggacctgcaggacttcttcgtgctgccggagctgcggcgggcacagagcctcacctgtactggcctctatcgtgaggctctggcactctgggccaatgcctggcagctgcaagcccagctgggcaccccctctggcccagaccgccccctgctgaccctggctgggctggccgtgtgccaccaggagctggaagaccctggagaggcccgggcatgctgtgagaaggccctgcagctgcttggggacaagagcctccaccctttgctggcaccctttctggaggcccatgtccggctctcctggcgcctgggcctggacaaacgtcaatcagaggctcggctccaagccctgcaggaggcaggccttacccccacaccaccccccagtctcaaagaattgctcatcaaggaggtgctggactaacccttgcctagatttaaggccactgtgaggagaggggttgccccagaaggcaggggaaggacctgatgagaacagaatagctgggaggctgcagagggtgctgggagcccctagaagttccaaaagagaatgtgaagcagatcaaggaaacttctgttgagctaggctcagggtgagctttggctggggttgcccttgtgtagtacagggaagtctgacacagcctctccagcctataaacagccggggggctgtggcacaggttggggcaatgttcccttgttggtgggcccccaagctggcaaggcctcttggctgaaggccagggactctgcccctggagtcctggagttaagggatgaaggcaaggctgcaggtctggcccaggggaattaaaagccagccactcc

SEQ ID NO: 5788 - protein, 373 aa, Homo sapiens
MHRGTQEGAMASRLLHRLRHALAGDGPGEAAASPEAEQFPESSELEDDDAEGLSSRLSGTLSFTSAEDDEDDEDEDDEEAGPDQLPLGDGTSGEDAERSPPPDGQWGSQLLARQLQDFWKKSRNTLAPQRLLFEVTSANVVKDPPSKYVLYTLAVIGPGPPDCQPAQISRRYSDFERLHRNLQRQFRGPMAAISFPRKRLRRNFTAETIARRSRAFEQFLGHLQAVPELRHAPDLQDFFVLPELRRAQSLTCTGLYREALALWANAWQLQAQLGTPSGPDRPLLTLAGLAVCHQELEDPGEARACCEKALQLLGDKSLHPLLAPFLEAHVRLSWRLGLDKRQSEARLQALQEAGLTPTPPPSLKELLIKEVLD

SEQ ID NO: 5789 - DNA, 1750 bp, Homo sapiens
gtggccgccgtcgcccggatcccctgagctgcccgccatcccacgtgaccgcgccgccccccagctccaccgctgagcccgctcgccatggccctcttcggggccctcttcctagcgctgctggcaggcgcacatgcagagttcccaggctgcaagatccgcgtcacctccaaggcgctggagctggtgaagcaggaggggctgcgctttctggagcaagagctggagactatcaccattccggacctgcggggcaaagaaggccacttctactacaacatctctgaggtgaaggtcacagagctgcaactgacatcttccgagctcgatttccagccacagcaggagctgatgcttcaaatcaccaatgcctccttggggctgcgcttccggagacagctgctctactggttcttctatgatgggggctacatcaacgcctcagctgagggtgtgtccatccgcactggtctggagctctcccgggatcccgctggacggatgaaagtgtccaatgtctcctgccaggcctctgtctccagaatgcacgcggccttcgggggaaccttcaagaaggtgtatgattttctctccacgttcatcacctcagggatgcgcttcctcctcaaccagcagatctgccctgtcctctaccacgcagggacggtcctgctcaactccctcctggacaccgtgcctgtgcgcagttctgtggacgagcttgttggcattgactattccctcatgaaggatcctgtggcttccaccagcaacctggacatggacttccggggggccttcttccccctgactgagaggaactggagcctccccaaccgggcagtggagccccagctgcaggaggaagagcggatggtgtatgtggccttctctgagttcttcttcgactctgccatggagagctacttccgggcgggggccctgcagctgttgctggtgggggacaaggtgccccacgacctggacatgctgctgagggccacctactttgggagcattgtcctgctgagcccagcagtgattgactccccattgaagctggagctgcgggtcctggccccaccgcgctgcaccatcaagccctctggcaccaccatctctgtcactgctagcgtcaccattgccctggtcccaccagaccagcctgaggtccagctgtccagcatgactatggacgcccgtctcagcgccaagatggctctccgggggaaggccctgcgcacgcagctggacctgcgcaggttccgaatctattccaaccattctgcactggagtcgctggctctgatcccattacaggcccctctgaagaccatgctgcagattggggtgatgcccatgctcaatgagcggacctggcgtggggtgcagatcccactacctgagggcatcaactttgtgcatgaggtggtgacgaaccatgcgggattcctcaccatcggggctgatctccactttgccaaagggctgcgagaggtgattgagaagaaccggcctgctgatgtcagggcgtccactgcccccacaccgtccacagcagctgtctgagccctcaatccccaagctggcagctgtcattcaggaccccaacccctctcagcccctcttttcccacattcatagcctgtagtgccccctctaacccccagtgccacagagaagacgggatttgaagctgtacccaatttaattccataatcaatctatcaattacagtccgtccaccacc

SEQ ID NO: 5790 - protein, 493 aa, Homo sapiens
MALFGALFLALLAGAHAEFPGCKIRVTSKALELVKQEGLRFLEQELETITIPDLRGKEGHFYYNISEVKVTELQLTSSELDFQPQQELMLQITNASLGLRFRRQLLYWFFYDGGYINASAEGVSIRTGLELSRDPAGRMKVSNVSCQASVSRMHAAFGGTFKKVYDFLSTFITSGMRFLLNQQICPVLYHAGTVLLNSLLDTVPVRSSVDELVGIDYSLMKDPVASTSNLDMDFRGAFFPLTERNWSLPNRAVEPQLQEEERMVYVAFSEFFFDSAMESYFRAGALQLLLVGDKVPHDLDMLLRATYFGSIVLLSPAVIDSPLKLELRVLAPPRCTIKPSGTTISVTASVTIALVPPDQPEVQLSSMTMDARLSAKMALRGKALRTQLDLRRFRIYSNHSALESLALIPLQAPLKTMLQIGVMPMLNERTWRGVQIPLPEGINFVHEVVTNHAGFLTIGADLHFAKGLREVIEKNRPADVRASTAPTPSTAAV

SEQ ID NO: 5791 - DNA, 2334 bp, Homo sapiens
agacacctctgccctcaccatgagcctctggcagcccctggtcctggtgctcctggtgctgggctgctgctttgctgcccccagacagcgccagtccacccttgtgctcttccctggagacctgagaaccaatctcaccgacaggcagctggcagaggaatacctgtaccgctatggttacactcgggtggcagagatgcgtggagagtcgaaatctctggggcctgcgctgctgcttctccagaagcaactgtccctgcccgagaccggtgagctggatagcgccacgctgaaggccatgcgaaccccacggtgcggggtcccagacctgggcagattccaaacctttgagggcgacctcaagtggcaccaccacaacatcacctattggatccaaaactactcggaagacttgccgcgggcggtgattgacgacgcctttgcccgcgccttcgcactgtggagcgcggtgacgccgctcaccttcactcgcgtgtacagccgggacgcagacatcgtcatccagtttggtgtcgcggagcacggagacgggtatcccttcgacgggaaggacgggctcctggcacacgcctttcctcctggccccggcattcagggagacgcccatttcgacgatgacgagttgtggtccctgggcaagggcgtcgtggttccaactcggtttggaaacgcagatggcgcggcctgccacttccccttcatcttcgagggccgctcctactctgcctgcaccaccgacggtcgctccgacggcttgccctggtgcagtaccacggccaactacgacaccgacgaccggtttggcttctgccccagcgagagactctacacccgggacggcaatgctgatgggaaaccctgccagtttccattcatcttccaaggccaatcctactccgcctgcaccacggacggtcgctccgacggctaccgctggtgcgccaccaccgccaactacgaccgggacaagctcttcggcttctgcccgacccgagctgactcgacggtgatggggggcaactcggcgggggagctgtgcgtcttccccttcactttcctgggtaaggagtactcgacctgtaccagcgagggccgcggagatgggcgcctctggtgcgctaccacctcgaactttgacagcgacaagaagtggggcttctgcccggaccaaggatacagtttgttcctcgtggcggcgcatgagttcggccacgcgctgggcttagatcattcctcagtgccggaggcgctcatgtaccctatgtaccgcttcactgaggggccccccttgcataaggacgacgtgaatggcatccggcacctctatggtcctcgccctgaacctgagccacggcctccaaccaccaccacaccgcagcccacggctcccccgacggtctgccccaccggaccccccactgtccacccctcagagcgccccacagctggccccacaggtcccccctcagctggccccacaggtccccccactgctggcccttctacggccactactgtgcctttgagtccggtggacgatgcctgcaacgtgaacatcttcgacgccatcgcggagattgggaaccagctgtatttgttcaaggatgggaagtactggcgattctctgagggcagggggagccggccgcagggccccttccttatcgccgacaagtggcccgcgctgccccgcaagctggactcggtctttgaggagccgctctccaagaagcttttcttcttctctgggcgccaggtgtgggtgtacacaggcgcgtcggtgctgggcccgaggcgtctggacaagctgggcctgggagccgacgtggcccaggtgaccggggccctccggagtggcagggggaagatgctgctgttcagcgggcggcgcctctggaggttcgacgtgaaggcgcagatggtggatccccggagcgccagcgaggtggaccggatgttccccggggtgcctttggacacgcacgacgtcttccagtaccgagagaaagcctatttctgccaggaccgcttctactggcgcgtgagttcccggagtgagttgaaccaggtggaccaagtgggctacgtgacctatgacatcctgcagtgccctgaggactagggctcccgtcctgctttgcagtgccatgtaaatccccactgggaccaaccctggggaaggagccagtttgccggatacaaactggtattctgttctggaggaaagggaggagtggaggtgggctgggccctctcttctcacctttgttttttgttggagtgtttctaataaacttggattctctaaccttt

SEQ ID NO: 5792 - protein, 707 aa, Homo sapiens
MSLWQPLVLVLLVLGCCFAAPRQRQSTLVLFPGDLRTNLTDRQLAEEYLYRYGYTRVAEMRGESKSLGPALLLLQKQLSLPETGELDSATLKAMRTPRCGVPDLGRFQTFEGDLKWHHHNITYWIQNYSEDLPRAVIDDAFARAFALWSAVTPLTFTRVYSRDADIVIQFGVAEHGDGYPFDGKDGLLAHAFPPGPGIQGDAHFDDDELWSLGKGVVVPTRFGNADGAACHFPFIFEGRSYSACTTDGRSDGLPWCSTTANYDTDDRFGFCPSERLYTRDGNADGKPCQFPFIFQGQSYSACTTDGRSDGYRWCATTANYDRDKLFGFCPTRADSTVMGGNSAGELCVFPFTFLGKEYSTCTSEGRGDGRLWCATTSNFDSDKKWGFCPDQGYSLFLVAAHEFGHALGLDHSSVPEALMYPMYRFTEGPPLHKDDVNGIRHLYGPRPEPEPRPPTTTTPQPTAPPTVCPTGPPTVHPSERPTAGPTGPPSAGPTGPPTAGPSTATTVPLSPVDDACNVNIFDAIAEIGNQLYLFKDGKYWRFSEGRGSRPQGPFLIADKWPALPRKLDSVFEEPLSKKLFFFSGRQVWVYTGASVLGPRRLDKLGLGADVAQVTGALRSGRGKMLLFSGRRLWRFDVKAQMVDPRSASEVDRMFPGVPLDTHDVFQYREKAYFCQDRFYWRVSSRSELNQVDQVGYVTYDILQCPED

SEQ ID NO: 5793 - DNA, 2063 bp, Homo sapiens
acttccggtggggagattccggcctggagctcccagggccgagcagaccttgggacctgtgagcgctgcatccaattaaccatgggaagggtcagcaccagccaccagccccttaggtgaggactctgcctggggctctgctgatggttccgaatcatggagctgcagagagctcctccagcctggagacgttcttggtgaaagctgtggtctaactccaccggctcttcctgcacattgtattcaagaggggtgcctgcccccgctgactcaggagctccggtgctgcagccgccacgaatggggaggtgggccctcgatgtggcctttttgtggaaggcggtgttgaccctggggctggtgcttctctactactgcttctccatcggcatcaccttctacaacaagtggctgacaaagagcttccatttccccctcttcatgacgatgctgcacctggccgtgatcttcctcttctccgccctgtccagggcgctggttcagtgctccagccacagggcccgtgtggtgctgagctgggccgactacctcagaagagtggctcccacagctctggcgacggcgcttgacgtgggcttgtccaactggagcttcctgtatgtcaccgtctcgctgtacacaatgaccaaatcctcagctgtcctcttcatcttgatcttctctctgatcttcaagctggaggagctgcgcgcggcactggtcctggtggtcctcctcatcgccgggggtctcttcatgttcacctacaagtccacacagttcaacgtggagggcttcgccttggtgctgggggcctcgttcatcggtggcattcgctggaccctcacccagatgctcctgcagaaggctgaactcggcctccagaatcccatcgacaccatgttccacctgcagccactcatgttcctggggctcttccctctctttgctgtatttgaaggtctccatttgtccacatctgagaaaatcttccgtttccaggacacagggctgctcctgcgggtacttgggagcctcttccttggcgggattctcgcctttggtttgggcttctctgagttcctcctggtctccagaacctccagcctcactctctccattgccggcatttttaaggaagtctgcactttgctgttggcagctcatctgctgggcgatcagatcagcctcctgaactggctgggcttcgccctctgcctctcgggaatatccctccacgttgccctcaaagccctgcattccagaggtgatggtggccccaaggccttgaaggggctgggctccagccccgacctggagctgctgctccggagcagccagcgggaggaaggtgacaatgaggaggaggagtactttgtggcccaggggcagcagtgaccagccagggcaaatggcttagaagcaggccactccccagcctgctgccagcactcactgtgctcaagccgccagggctcatcatggtagctgggagctgtggacgggagtcaccaggtggtggggccaagccagggactcatgacttttgcccctcccttcagagcctggtcacacaaggggcgagcaccaggccagcctgggactggccagagctgggcccaagctgcgctggaatcgcagcaggagaggggagtgggctggttcttcccaccacttcccaggctctgacagccgagactcatttccaaggcacagcagctttctaaagggactgagtttggactgggttttggacctccaggggctggagcttcatcacctgggcagtgtcttttctcagagagcaggtttctttatagtttggaaataaatggttcacggtccactggccgccttgtgttgctggagacgtgggggcagggaggggacagtgtgggcctggcctctcctttcctttccctgcctggagccttcttcaaatgtctggtcttaagccaggcctccttcattttctcgctcctgttagaacaccagtcccctccccagtggggccccactgcacctgctggcaggaaataaatgaatgtttactgagtactgca

SEQ ID NO: 5794 - DNA, 2700 bp, Homo sapiens
gcgcgctctgctcggctgcaggctcaggaagcggcgcggcggcacgtgctgggccagagccccgcgccctgcgtccagccgccgggtgtgtgcgcccgcgtagcccagcgtcgcgcctcggcgcccccacgcgcccacgcagcggcgcggggacccgggcgggggcagagggagggcccggcccagggaggagaaggggccggtcctcccggcgcaggcagcagccgcggcagcccaggaggcggaggcagcggcaacggcagagacagcaacgtgcccgccgcagtcagcccggcctcgtcggacccgcaccggcccgcccgcccgcccgcaccgcgtcggggcgccctctccactgcgcgcggtacaaggaaatggtagaactagtgatctcacccagcctcactgtaaacagcgattgtctggataaactgaagtttaaccgtgctgacgctgctgtgtggactctgagtgacagacaaggcatcaccaaatcggcccccctgagagtgtcccagctcttctccagatcttgcccacgtgtcctcccccgccagccttccacagccatggcagcctacggccagacgcagtacagtgcggggatccagcaggctaccccctatacagcttacccacctccagcacaagcctatggaatcccttcctacagcatcaagacagaagacagcttgaaccattcccctggccagagtggattcctcagctatggctccagcttcagcacctcacccactggacagagcccatacacctaccagatgcacggcacaacagggttctatcaaggaggaaatggactgggcaacgcagccggtttcgggagtgtgcaccaggactatccttcctaccccggcttcccccagagccagtacccccagtattacggctcatcctacaaccctccctacgtcccggccagcagcatctgcccttcgcccctctccacgtccacctacgtcctccaggaggcatctcacaacgtccccaaccagagttccgagtcacttgctggtgaatacaacacacacaatggaccttccacaccagcgaaagagggagacacagacaggccgcaccgggcctccgacgggaagctccgaggccggtctaagaggagcagtgacccgtccccggcaggggacaatgagattgagcgtgtgttcgtgtgggacttggatgagacaataattatttttcactccttactcacggggacatttgcatccagatacgggaaggacaccacgacgtccgtgcgcattggccttatgatggaagagatgatcttcaaccttgcagatacacatctgttcttcaatgacctggaggattgtgaccagatccacgttgatgacgtctcatcagatgacaatggccaagatttaagcacatacaacttctccgctgacggcttccacagttcggccccaggagccaacctgtgcctgggctctggcgtgcacggcggcgtggactggatgaggaagctggccttccgctaccggcgggtgaaggagatgtacaatacctacaagaacaacgttggtgggttgataggcactcccaaaagggagacctggctacagctccgagctgagctggaagctctcacagacctctggctgacccactccctgaaggcactaaacctcatcaactcccggcccaactgtgtcaatgtgctggtcaccaccactcaactaattcctgccctggccaaagtcctgctatatggcctggggtctgtgtttcctattgagaacatctacagtgcaaccaagacagggaaggagagctgcttcgagaggataatgcagagattcggcagaaaagctgtctacgtggtgatcggtgatggtgtggaagaggagcaaggagcgaaaaagcacaacatgcctttctggcggatatcctgccacgcagacctggaggcactgaggcacgccctggagctggagtatttatagcaggatcagcagcatctccacctgccatctcaccctcagaccccctcgccttccccacctccccaccgagaactccagagacccagatgttggacaccaggaaggggccccacagccgagacgacgtgtccagtgaccatctcagaagccgtccatcagtccaaatgggggttctgagaaggaaagtacccaacattggcttcggagtatttgactttggggaaaagggctggctcggagtctagactcttctgtaagactcacagaacaaaagcaaggaattgctgatttggggggtgcctggtgatgaggaggggatgggtttgtcttgtcttctttttaatttatggactagtctcattactccggaattatgctcttgtacctgtgtggctgggtttcttagtcgttggtttggtttggttttttgaactggtatgtggggtggttcacagttctaatgtaagcactctattctccaagttgtgctttgtggggacaatcattctttgaacattagagaggaaggcagttcaagctgttgaaaagactattgcttatttttgtttttaaagacctacttgacgtcatgtggacagtgcacgtgccttacgctacatcttgttttctaggaagagggggatgctgggaaggaatgggtgctttgtgatggataaaaggcattaaataaaaccacgtttacattttg

SEQ ID NO: 5795 - DNA, 6544 bp, Homo sapiens
cggcgccgcgcggccgcgctagaatggaggcgcccagcggcagcgagcccggcggcgacggggccggggactgcgcccacccggacccccgggcccctggcgccgcggcgcccagctccggccccggcccgtgcgcggccgcccgggagtccgagcgccagctgcgcctccgcctctgcgtcctcaacgagatcttgggcaccgagagggactacgtgggcaccttgcgcttcttgcagtcggcattcctgcatcgcatccggcagaacgtggccgactcagtggagaagggcctcacggaggagaatgtcaaggtcctgttctcgaacatcgaagacatcctggaagttcataaggatttcttggccgccttggagtattgtttacacccggagccgcagtctcagcatgaacttgggaatgttttcttaaaattcaaggacaagttctgcgtgtacgaggagtattgcagcaaccatgagaaagccctgaggctgctggtggagctgaacaagatccctaccgtgcgcgccttccttttgagctgcatgcttctgggaggccggaagaccacggacatccctttggaaggctacctgttgtctccgatccagaggatctgcaagtacccgctcctccttaaggagctggccaagaggactcccggcaagcacccagaccaccccgcggtccagagtgccctgcaggccatgaagaccgtttgctccaacatcaatgagaccaagcggcagatggagaagctggaagccctggagcagctgcagtcccacatcgaaggctgggagggttccaacctcacagacatctgcactcagctcctcctgcaagggactttgttaaagatctctgcgggcaacatccaggaaagggccttcttcctcttcgacaaccttctcgtctactgcaagcggaaatccagggtcaccgggagcaagaagtccaccaagaggaccaaatccatcaacggctccctctacatcttcaggggtcgaatcaacactgaagtcatggaggtggagaatgtggaagatgggacagcggattaccatagcaacggctataccgtcaccaacggctggaagatccacaacacggccaagaataagtggtttgtctgcatggccaagacggcagaggagaagcagaagtggctggatgccatcatccgcgagcgggagcagcgcgagagcctgaagctgggcatggagcgtgatgcctacgtcatgattgcggagaagggggagaagctgtaccacatgatgatgaacaagaaggtgaacctcatcaaggaccgccggagaaagctgagcactgtccccaagtgctttcttggcaatgagttcgttgcctggctcctagaaattggtgaaatcagcaagacggaagaaggagtcaacttgggccaagccctgttggagaatggcatcatccaccatgtttccgacaagcaccagttcaagaatgagcaggtgatgtatcgcttccgctacgacgatggcacctacaaggcccgaagtgagctggaggacatcatgtccaagggtgtgaggctttactgccgtcttcacagcctctacaccccggtgatcaaagaccgtgattaccacctgaagacctacaagtcagtgcttcccgggagcaagctggtggactggctgctggctcagggagactgccagactcgggaggaggcagtggcgctcggcgtgggtctgtgcaacaatggcttcatgcaccacgtgctggagaagagcgagttcagggatgagtcccagtacttccgctttcatgctgacgaggagatggaggggaccagcagcaagaacaaacagcttcgcaacgacttcaagctggtggagaacattctggccaagcgcctgctgatcctgccccaggaggaggactatggctttgacatcgaggagaagaacaaggctgtggtggtgaagtccgtccagaggggctcgctggctgaggtggctggcctgcaggtggggaggaagatctactccatcaatgaggacctggtgttcctgcggccgttttcagaggtggagtccatcctcaaccagtccttctgctcccgccgccctctgcgcctcctggtggccacgaaggccaaagagatcatcaaaatccccgaccagccggacacactgtgcttccagattcgtggagctgccccaccgtacgtctatgctgtggggagaggctctgaggccatggctgcagggctctgtgctggtcagtgcattctgaaggtcaatggcagcaacgtgatgaacgatggtgcccctgaggtcctggagcacttccaggcattccggagtcggcgcgaagaggccctgggcctgtaccagtggatctaccacacccatgaggatgcccaggaagcacgagccagtcaggaggcctccactgaggaccccagtggcgagcaggcccaggaggaagaccaggctgattcagccttcccactgctgtccctgggtccccggctgagcctgtgtgaggacagccccatggtcaccctgactgtggacaacgtgcacctggaacacggcgtggtgtatgagtatgtgagcacggcaggcgtcaggtgccatgtgctggagaagatcgtggagccccgcggctgcttcggcctcaccgccaagatcctcgaggcctttgctgccaatgacagcgtcttcgtggagaactgcaggcggctcatggccctgagcagcgccatcgtgaccatgccccactttgagttccgcaacatctgtgacaccaagctggagagcattggccagaggattgcctgctaccaggagtttgcagcccaactgaagagcagggtcagcccacccttcaaacaagcccccctggagccccacccgctgtgtggcctggacttctgccccaccaattgccacatcaacctcatggaagtgtcctaccccaagaccaccccctcagtgggcaggtccttcagcatccgctttggacgcaaaccctccctcatcggccttgacccggagcaaggccacctgaaccccatgtcgtacacccagcactgcatcaccaccatggctgctccctcctggaagtgcttgcctgctgcagagggtgatccccaaggccagggtctccatgatggcagcttcgggccagccagtgggacccttggtcaggaagaccggggcctcagcttcctactcaagcaggaggaccgtgagatccaggatgcctacctgcagctcttcaccaagctggatgtggccctgaaggagatgaagcaatatgtcacccagatcaacaggctgctgtccaccatcacagagcccacctcgggtgggtcctgcgacgcatccttggctgaggaggcctcctccctgcccctggtcagtgaagagagcgagatggacaggagtgaccatgggggcatcaagaaggtgtgcttcaaggtggccgaggaggaccaggaggactcaggccacgacaccatgagttatcgcgactcctacagcgagtgtaacagcaatcgagactcggtcctgtcctacaccagcgtgagaagtaacagctcctacttgggcagcgacgagatggggtctggagatgagctgccctgtgacatgcggatcccatctgacaagcaggacaagcttcatggctgcctggagcacctctttaaccaggtggactccatcaatgctctcctcaaggggccagtcatgagccgggctttcgaagagaccaagcatttccctatgaaccacagcttacaagagtttaaacagaaagaagagtgtacaatccgtggccggagcctgatccagattagcatccaggaggacccctggaacctccccaactccatcaagaccctggtggacaacattcagagatatgtggaagatgggaagaaccagctgctcctggccttgctgaagtgcacagacacggagctgcagctgcgcagagacgcgatcttctgccaggccctggtggccgccgtgtgcaccttctccaagcagctgctggcggccctgggctaccgctacaacaacaatggcgagtacgaggagagcagccgcgacgccagccgcaagtggctggagcaggtggcggccacgggcgtcctgctgcactgccagtccctgctctcgccagccacagtgaaggaggaacggaccatgctggaggacatctgggtgacgctgtcagagctggacaatgtcaccttctcctttaagcagctggacgagaactatgtggccaacaccaacgtcttctaccacattgagggcagccggcaggcgctgaaggtcatcttctacctcgacagctaccacttctccaagctgccctcccgcctggagggtggggccagcctgaggctgcacacagcgctgttcacgaaagtgctggagaacgtggaggggctgccttctccaggcagccaggccgcggaggatttgcagcaggacatcaacgcgcagtccctggagaaagttcagcagtattaccgcaaactcagggcattttacctggagcggtctaacctgcccacggatgccagcaccacggcggtaaagatagaccagctgatccgccccatcaatgccctggatgagctctgccgcctcatgaagtcctttgtccacccaaagcctggtgctgctgggagtgtgggcgccggcctcatccccatctcctcggagctctgctaccgcctgggggcctgccagatggtcatgtgtggcacaggcatgcagaggagcaccctgagcgtgtccctggagcaggcggccatcttggcacggagccacgggttgctgcccaagtgcatcatgcaggccacggacatcatgcggaagcagggcccaagggtggagattctggccaaaaacctgcgagtcaaggaccagatgccccagggtgctccgcgcctctaccgcctctgccagccgccggtggatggggacctctgaacacccaaatgccccacgctgggccgcggcctctggagctgggatttgggaggacacagcaggcagcgctggccaccctcgctgtgatgacgagctggctgattggccctgggccggcccattcttcacacgcctgccagaagctggaggggtgctggagacccatagagctgatgggagcagctggtgcctggccttcggctcctgcgtccccagaacccaagggaacgtcatggaggccacatggggccacccggctccctcgggatggctccgcctgcacttttgaaaccccggtttccttcaacgtccacattccaggtgaccacacgtgtctcctcctcctcatcttagcttccaggttcaccctaaccctgtactaacctgcttggtggacttggaaaagacttggctctgtcgggaaaggagagacggggcctccatcacgcctgttaccagaggatccccgagagccacaccagctctggacatcaccgcccctggaactggggccaccagccctgggcacgagatttgctctgactttatttatatggcatgaaatctctggtttattttgggattttttgttgttggtgttgtcaaagtttgttttttctaaagttgtgtgattatatatttgacattttacatttcaaagaaaggtatgttgtctaacaggggaccaacagaaggtagtattgacaactgttcctgcttctactaaaaaaaaaagagcacaaaagaaaaactaaattattgaaaaattaaaaaatgtcattgtttcctgtttgttaatattagggttgtaaggtgtcgttttgaggtatcgactgtgattccttcccccaccctccattctccagcggttggccggtgttagaactcgctctctttgagtgactggctacaagggcctgagaggtggccagccagggttggagctggaggggatggagccccacctgaggtgccgtgtcacacgggttagagggtcactgggaaacaccgggcggtggcttctgtgatttattttcttgatggtaacttctcagagcagggcgattgggacatcaccagccagagcacaggaagccaccctgcctgctggggaggagggacccacacaagccccctcggcagtttgtccccccagcttcggtatgccttcagggaaaggtcacagctggggaggaagcggggggacgcctgtcacccctggcaggtggtgagttcaggtgggggctccctgctgcccccaggcctgggagcttgaagccctcccggcatctggcatccgagcctcccgccctccagggtgcgcttccctctcttgccgcagcatacacgagggcaggcagtggccttgtcactgtatcttgcatcagagacaaaggaggacccgctttagccctgctgcgggaaatgggggagggcccagggccagcgcattgtgcactggtttactttaaaatgtacagattcttctcgttaaattcttgatagattttttattattattaaaagtcagtttataatac

SEQ ID NO: 5796 - DNA, 3611 bp, Homo sapiens
gcattcctggccccgccccctgcagcgggccgctcgctcatgcgctctggcctcaggctcgctgtcgcgccattttgccggggtttgaatgtgaggcggagcggcggcaggagcgggtagtgccagctacggtccgcggctggggttccctcctccgtttctgtatccccacgagatcctatagcaatggaactcagcgatgcaaatctgcaaacactaacagaatatttaaagaaaacacttgatcctgatcctgccatccgacgtccagctgagaaatttcttgaatctgttgaaggaaatcagaattatccactgttgcttttgacattactggagaagtcccaggataatgttatcaaagtatgtgcttcagtaacattcaaaaactatattaaaaggaactggagaattgttgaagatgaaccaaacaaaatttgtgaagccgatcgagtggccattaaagccaacatagtgcacttgatgcttagcagcccagagcaaattcagaagcagttaagtgatgcaattagcattattggcagagaagattttccacagaaatggcctgacttgctgacagaaatggtgaatcgctttcagagtggagatttccatgttattaatggagtcctccgtacagcacattcattatttaaaagataccgtcatgaatttaagtcaaacgagttatggactgaaattaagcttgttctggatgcctttgctttgcctttgactaatctttttaaggccactattgaactctgcagtacccatgcaaatgatgcctctgccctgaggattctgttttcttccctgatcctgatctcaaaattgttctatagtttaaactttcaggatctccctgaattttttgaagataatatggaaacttggatgaataattttcatactctcttaacattggataataagcttttacaaactgatgatgaagaggaagccggcttattggagctcttaaaatcccagatttgtgataatgccgcactctatgcacaaaagtacgatgaagaattccagcgatacctgcctcgttttgttacagccatctggaatttactagttacaacgggtcaagaggttaaatatgatttgttggtaagtaatgcaattcaatttctggcttcagtttgtgagagacctcattataagaatctatttgaggaccagaacacgctgacaagtatctgtgaaaaggttattgtgcctaacatggaatttagagctgctgatgaagaagcatttgaagataattctgaggagtacataaggagagatttggaaggatctgatattgatactagacgcagggctgcttgtgatctggtacgaggattatgcaagttttttgagggacctgtgacaggaatcttctctggttatgttaattccatgctgcaggaatacgcaaaaaatccatctgtcaactggaaacacaaagatgcagccatctacctagtgacatctttggcatcaaaagcccaaacacagaagcatggaattacacaagcaaatgaacttgtaaacctaactgagttctttgtgaatcacatcctccctgatttaaaatcagctaatgtgaatgaatttcctgtccttaaagctgacggtatcaaatatattatgatttttagaaatcaagtgccaaaagaacatcttttagtctcgattcctctcttgattaatcatcttcaagctgaaagtattgttgttcatacttacgcagctcatgctcttgaacggctctttactatgcgagggcctaacaatgccactctctttacagctgcagaaatcgcaccgtttgttgagattctgctaacaaaccttttcaaagctctcacacttcctggctcttcagaaaatgaatatattatgaaagctatcatgagaagtttttctctcctacaagaagccataatcccctacatccctactctcatcactcagcttacacagaagctattagctgttagtaagaacccaagcaaacctcactttaatcactacatgtttgaagcaatatgtttatccataagaataacttgcaaagctaaccctgctgctgttgtaaattttgaggaggctttgtttttggtgtttactgaaatcttacaaaatgatgtgcaagaatttattccatacgtctttcaagtgatgtctttgcttctggaaacacacaaaaatgacatcccgtcttcctatatggccttatttcctcatctccttcagccagtgctttgggaaagaacaggaaatattcctgctctagtgaggcttcttcaagcattcttagaacgcggttcaaacacaatagcaagtgctgcagctgacaaaattcctgggttactaggtgtctttcagaagctgattgcatccaaagcaaatgaccaccaaggtttttatcttctaaacagtataatagagcacatgcctcctgaatcagttgaccaatataggaaacaaatcttcattctgctattccagagacttcagaattccaaaacaaccaagtttatcaagagttttttagtctttattaatttgtattgcataaaatatggggcactagcactacaagaaatatttgatggtatacaaccaaaaatgtttggaatggttttggaaaaaattattattcctgaaattcagaaggtatctggaaatgtagagaaaaagatctgtgcggttggcataaccaaattactaacagaatgtcccccaatgatggacactgagtataccaaactgtggactccattattacagtctttgattggtctttttgagttacccgaagatgataccattcctgatgaggaacattttattgacatagaagatacaccaggatatcagactgccttctcacagttggcatttgctgggaaaaaagagcatgatcctgtaggtcaaatggtgaataaccccaaaattcacctggcacagtcacttcacaagttgtctaccgcctgtccaggaagggttccatcaatggtgagcaccagcctgaatgcagaagcgctccagtatctccaagggtaccttcaggcagccagtgtgacactgctttaaactgcatttttctaatgggctaaacccagatggtttcctaggaaatcacaggcttctgagcacagctgcattaaaacaaaggaagttctccttttgaacttgtcacgaattccatcttgtaaaggatattaaatgttgctttaacctgaaccttgagcaaattagttggtttgtgtgatcatacagttatgtgggtggcttctagtttgcaacttcaagggacaagtattaatagttcagtgtatggcgttggtttgtgttgagcgtttgcacggtttggataatcttaaattttgacggacactgtggagactttctgttactaaatccttttgttttgaagctgttgctatttgtatttctcttgtcctttatattttttgtctgtttatttacgcttttattggaaatgtgaataagtaaagaattacttgtgttacttgccaagcagtgcacatttcatagtttcaaatctgtaatcagcaataaaaatcctaaaatatgtacct

SEQ ID NO: 5797 - protein, 971 aa, Homo sapiens
MELSDANLQTLTEYLKKTLDPDPAIRRPAEKFLESVEGNQNYPLLLLTLLEKSQDNVIKVCASVTFKNYIKRNWRIVEDEPNKICEADRVAIKANIVHLMLSSPEQIQKQLSDAISIIGREDFPQKWPDLLTEMVNRFQSGDFHVINGVLRTAHSLFKRYRHEFKSNELWTEIKLVLDAFALPLTNLFKATIELCSTHANDASALRILFSSLILISKLFYSLNFQDLPEFFEDNMETWMNNFHTLLTLDNKLLQTDDEEEAGLLELLKSQICDNAALYAQKYDEEFQRYLPRFVTAIWNLLVTTGQEVKYDLLVSNAIQFLASVCERPHYKNLFEDQNTLTSICEKVIVPNMEFRAADEEAFEDNSEEYIRRDLEGSDIDTRRRAACDLVRGLCKFFEGPVTGIFSGYVNSMLQEYAKNPSVNWKHKDAAIYLVTSLASKAQTQKHGITQANELVNLTEFFVNHILPDLKSANVNEFPVLKADGIKYIMIFRNQVPKEHLLVSIPLLINHLQAESIVVHTYAAHALERLFTMRGPNNATLFTAAEIAPFVEILLTNLFKALTLPGSSENEYIMKAIMRSFSLLQEAIIPYIPTLITQLTQKLLAVSKNPSKPHFNHYMFEAICLSIRITCKANPAAVVNFEEALFLVFTEILQNDVQEFIPYVFQVMSLLLETHKNDIPSSYMALFPHLLQPVLWERTGNIPALVRLLQAFLERGSNTIASAAADKIPGLLGVFQKLIASKANDHQGFYLLNSIIEHMPPESVDQYRKQIFILLFQRLQNSKTTKFIKSFLVFINLYCIKYGALALQEIFDGIQPKMFGMVLEKIIIPEIQKVSGNVEKKICAVGITKLLTECPPMMDTEYTKLWTPLLQSLIGLFELPEDDTIPDEEHFIDIEDTPGYQTAFSQLAFAGKKEHDPVGQMVNNPKIHLAQSLHKLSTACPGRVPSMVSTSLNAEALQYLQGYLQAASVTLL

SEQ ID NO: 5798 - DNA, 2657 bp, Homo sapiens
aagtgacgcatggtacttgcgcaaagacgacgaggaggctgcgaaaagttaagggccggaccgcaggctgtgctcgcttccggaagtggcttctgcgacaacatgcttgcggacctcggcttaatcggaaccataggcgaggatgacgaggtgccggtggagcccgagtctgactccggggacgaggaagaggaggggcccattgtgctgggcagacgacaaaaagctttggggaagaaccgcagtgctgatttcaaccctgatttcgttttcactgagaaggaggggacgtacgatggcagctgggccctggctgatgtcatgagccaactcaagaagaagagggcagccactacattagatgagaagattgagaaagttcgaaagaaaaggaaaacagaggataaagaagccaagtctgggaagttggaaaaggagaaagaagcaaaggaaggctctgaaccaaaggagcaggaagaccttcaagagaatgatgaggaaggctcagaagatgaagcctcggagactgactactcatcagctgatgagaacatcctcaccaaagcagatacactcaaagtaaaggatcggaagaagaagaagaagaaaggacaggaagcaggaggattttttgaagatgcatctcagtacgatgaaaacctctcgttccaggacatgaacctttcccgccctcttctgaaggccattacagccatgggcttcaagcagcccaccccgatccagaaggcgtgcatacctgtgggtctattggggaaggacatctgtgcctgtgcagccactgggacaggtaaaactgccgcctttgccctgcctgttttggagcgtctgatttataaaccccgccaggctccagtcacccgcgtgctggtgctagtgcccacccgagagctgggcatccaggtgcactctgtcaccagacagctggcccagttctgcaacatcaccacctgcctggctgtgggcggcttggatgtgaagtctcaggaagcagctcttcgggcagcgcctgacatcctcatcgccaccccaggccggctcatcgatcacctccacaactgcccttccttccacctgagcagcatcgaggtgctcatcctggacgaggctgacaggatgctggatgagtactttgaggagcagatgaaggagatcatccgaatgtgttcccaccaccgccagaccatgctcttctcggccaccatgacagacgaggtgaaagatctggcttctgtctccttgaagaatcctgtccggatatttgtgaacagcaacacagatgtggctcccttcctgcggcaggagttcatccggatccggcctaatcgtgaaggagaccgggaagccatcgtggcagctttgttgacgaggaccttcactgaccatgtgatgctgttcacgcaaaccaagaagcaggcccaccgcatgcacatcctcctggggctcatggggctgcaggtgggtgagctccatggcaacttgtcacagacgcagcggctggaggccctccggcgttttaaggatgaacagattgacatcctcgtggccactgatgtggcagcccgtggacttgacattgagggggtcaaaacggtaatcaacttcacaatgcctaataccatcaaacattatgtccaccgggtggggcgaacagcacgtgctggcagggctgggcgctcagtctctctggtgggagaagatgagcggaagatgctgaaggagattgtaaaagctgccaaggcccctgtgaaggccaggatacttccccaagatgtcatcctcaaattccgggacaagattgagaaaatggagaaagatgtgtatgcagttctgcagctagaggcggaggaaaaagagatgcagcagtcagaagcccagatcaatacagcaaagcggctcctggagaaggggaaggaggcagtggtccaagagcccgagaggagctggttccagaccaaagaagagaggaagaaggagaaaattgccaaagctctgcaggaatttgacttggccttaagaggaaagaagaaaaggaagaagtttatgaaggatgccaaaaaaaagggggagatgacagcagaggaaaggtctcagtttgaaatcctcaaggcgcagatgtttgctgaacggctagcgaagaggaatcgcagagccaagcgggcccgagcaatgcccgaggaggagccagtgagaggtcctgccaagaagcaaaagcaggggaagaaatctgtatttgatgaagaactcaccaacacaagcaagaaggccctgaaacagtatcgagctagcccttcctttgaagaaaggaaacagttgggcttgccccaccagagacgaggaggaaactttaaatctaaatccagatacaagaggaggaagtagctgtcgtggcctgaagaaattcatgggggcagcccttaaatcccttccctgtgggaagtcatcctggctggtctgtcttttctccatttgtttaaaaaaaaaacaaaaacaaaaaacaacactttggtgtggtggtatggtacgtagctattttcctaagcatgtctgtcaatctcccttcttgctgattagctttcatatgactatattaaatggaagtatttttgggaaaagagaaaccaaaaaaaaaaaaaaaa

SEQ ID NO: 5799 - protein, 796 aa, Homo sapiens
MVLAQRRRGGCEKLRAGPQAVLASGSGFCDNMLADLGLIGTIGEDDEVPVEPESDSGDEEEEGPIVLGRRQKALGKNRSADFNPDFVFTEKEGTYDGSWALADVMSQLKKKRAATTLDEKIEKVRKKRKTEDKEAKSGKLEKEKEAKEGSEPKEQEDLQENDEEGSEDEASETDYSSADENILTKADTLKVKDRKKKKKKGQEAGGFFEDASQYDENLSFQDMNLSRPLLKAITAMGFKQPTPIQKACIPVGLLGKDICACAATGTGKTAAFALPVLERLIYKPRQAPVTRVLVLVPTRELGIQVHSVTRQLAQFCNITTCLAVGGLDVKSQEAALRAAPDILIATPGRLIDHLHNCPSFHLSSIEVLILDEADRMLDEYFEEQMKEIIRMCSHHRQTMLFSATMTDEVKDLASVSLKNPVRIFVNSNTDVAPFLRQEFIRIRPNREGDREAIVAALLTRTFTDHVMLFTQTKKQAHRMHILLGLMGLQVGELHGNLSQTQRLEALRRFKDEQIDILVATDVAARGLDIEGVKTVINFTMPNTIKHYVHRVGRTARAGRAGRSVSLVGEDERKMLKEIVKAAKAPVKARILPQDVILKFRDKIEKMEKDVYAVLQLEAEEKEMQQSEAQINTAKRLLEKGKEAVVQEPERSWFQTKEERKKEKIAKALQEFDLALRGKKKRKKFMKDAKKKGEMTAEERSQFEILKAQMFAERLAKRNRRAKRARAMPEEEPVRGPAKKQKQGKKSVFDEELTNTSKKALKQYRASPSFEERKQLGLPHQRRGGNFKSKSRYKRRK

SEQ ID NO: 5800 - DNA, 2157 bp, Homo sapiens
gaaaatgatctccaaaagatttctcagcaaggcagatttacttctgcagaatggtgctgcttgcactcctggtcacagtgagagcaccccgaacaaaggaggtgaagtggtttttatccctaacacagctagttcctgcttctgtgttctatccccattggctagagtccaatctaaactagtcctgattggctattttaaacaggaggggtgtgggttacagcagtgggaagagcagttgccacgagcgagggagacttttccagataaggaacaaatgcgggttacaggttgggattggtgggagaaatgtttacagaatgggtaattaggagtgggaaggtatgaggaagttgaccttaagaacaaagaacaaggaagttaaactttgaagagaaacccatcatacctaacagtcttgtaagaaaggatgacaaagtgattgaacattgggtggagctaattttccttggccaattcacttagtaagataaggagctccaaatcatatttaagttgggagtcaattgattttacttaattcttgtgaggttcagttataagattcatcatactactaccatgagccatcctcagctccttgttacatgggcctgttaacatggcagctttgtctataagcaaacccaggagagaaagacatagcagagatggatgtttgaagtctataccttccaccccctttaaagagaaagtaacaccactccttttctgtgtcccttggggacactacctccatgtctggtcacatggctggactttacagcagataagcatactgtggcctgagaccatgattgtatgctttccttctgctgacctttacaatccctcaataaattgagctaacacagggaagcttttttaccaaataactgtgttgcatcatcctccagtttgcctggtgtccttaatcaatggaaggggaataagcaaactgagttttcttacaccttttgagtatagtgtttttgccatcatagatgtggctcctcataattctccaacttttatattaaaaaaccaaaacctcaaaaattgtagttcatgtcagtcagtgatgactcatcttagaagtattttgtttttggatgtgtgaatgtgcatagttcttaaagtccaacattcatgtaataagacatcttgcatataacaatgacccttacgtctaagatgttaaatagatcctaagcctggtataactttattcaagtatccttatttgcccctaaaatgtctttaatacacattacttgggttatttcttgaatgaacatacaggtatcccaatttctgtttttaagagaatggggtcttgctctgtcacccaggctggagtgcagtggtgcagtcatggcttactgcatccatgatcctcctgcctcagcctcccaagtagatgggactgaaagcacacactgccatccctggctaatgttttcatattttgtagagttgcagccttgctacgtgacccaggctggagtgtagtagctattcacaggcatgattgcttgaaactcatggcttcaagggaaactcccaccctcaatatcctcagtagctgcaactacagccataccccccactgctcagcttctcatcctttaaaagatttttactggtagtgtcctcattctgggtttttgtcttctgtgtttactgtgacatgaagtcatttttagatgaaggttaaacattttgccaacgcaggtacaatatgggattcaataaaagtacagaattaaagttgtcttattagagattgggaagtttcccagctccgtttatcggtacttggccgtaccgataaaggggatggacttggagtgaccaggtcttagtcacatgtattttcataccctaaacaagaagcggtatagaccagaatggagcactgattgtaatccaccttctttcttagaaactggcgatggaatatgagaggagccctctggaaagaaaaggacagaccctgtgctttcatgaaagtgaagatctggctgaaccagttccacaaggttactgtatacatagcctgagtttaaaaggctgtgcccacttcaagaatgtcattgttagactttgaaatttctaactgcctacctgcataaagaaaataaaatcttttaaatc

SEQ ID NO: 5801 - protein, 107 aa, Homo sapiens [sequence omitted]

SEQ ID NO: 5802 - DNA, 1708 bp, Homo sapiens
ggcacggcctagcgagtggttcttctgcgctactgctgcgcgaatcggcgaccccagtgcctcgaccactatgccgcgctctttcctcgtcaggaagccctccgaccccaatcggaagcctaactacagcgagctgcaggactctaatccagagtttaccttccagcagccctacgaccaggcccacctgctggcagccatcccacctccggagatcctcaaccccaccgcctcgctgccaatgctcatctgggactctgtcctggcgccccaagcccagccaattgcctgggcctcccttcggctccaggagagtcccagggtggcagagctgacctccctgtcagatgaggacagtgggaaaggctcccagccccccagcccaccctcaccggctccttcgtccttctcctctacttcagtctcttccttggaggccgaggcctatgctgccttcccaggcttgggccaagtgcccaagcagctggcccagctctctgaggccaaggatctccaggctcgaaaggccttcaactgcaaatactgcaacaaggaatacctcagcctgggtgccctcaagatgcacatccgaagccacacgctgccctgcgtctgcggaacctgcgggaaggccttctctaggccctggctgctacaaggccatgtccggacccacactggcgagaagcccttctcctgtccccactgcagccgtgccttcgctgaccgctccaacctgcgggcccacctccagacccactcagatgtcaagaagtaccagtgccaggcgtgtgctcggaccttctcccgaatgtccctgctccacaagcaccaagagtccggctgctcaggatgtccccgctgaccctcgaggctccctcttcctctccatacctgcccctgcctgacagccttccccagctccagcaggaaggaccccacatccttctcactgccatggaattccctcctgagtgccccacttctggccacatcagccccacaggactttgatgaagaccattttctggttctgtgtcctctgcctgggctctggaagaggccttcccatggccatttctgtggagggagggcagctggcccccagccctgggggattcctgagctggcctgtctgcgtgggtttttgtatccagagctgtttggatacagctgctttgagctacaggacaaaggctgacagactcactgggaagctcccaccccactcaggggaccccactcccctcacacacacccccccacaaggaaccctcaggccaccctccacgaggtgtgactaactatgcaataatccacccccaggtgcagccccagggcctgcggaggcggtggcagactagagtctgagatgccccgagcccaggcagctatttcagcctcctgtttggtggggtggcacctgtttcccgggcaatttaacaatgtctgaaaagggactgtgagtaatggctgtcacttgtcgggggcccaagtggggtgctctggtctgaccgatgtgtctcccagaactattctgggggcccgacaggtgggcctgggaggaagatgtttacatttttaaaggtacactggtatttatatttcaaacattttgtatcaaggaaacgttttgtatagttatatgtacagtttattgatattcaataaagcagttaatttatatattaaaaaaaaaaaaaaaaaa

SEQ ID NO: 5803 - protein, 264 aa, Homo sapiens
MPRSFLVRKPSDPNRKPNYSELQDSNPEFTFQQPYDQAHLLAAIPPPEILNPTASLPMLIWDSVLAPQAQPIAWASLRLQESPRVAELTSLSDEDSGKGSQPPSPPSPAPSSFSSTSVSSLEAEAYAAFPGLGQVPKQLAQLSEAKDLQARKAFNCKYCNKEYLSLGALKMHIRSHTLPCVCGTCGKAFSRPWLLQGHVRTHTGEKPFSCPHCSRAFADRSNLRAHLQTHSDVKKYQCQACARTFSRMSLLHKHQESGCSGCPR

SEQ ID NO: 5804 - DNA, 2394 bp, Homo sapiens
ttcacacggcacgacttcatcgagaccaacggggacaactgcctggtgacactgctgccgctgctaaacatggcctacaagttccgcacccacagccctgaagccctggagcagctatacccctgggagtgcttcgtcttctgcctgatcatcttcggcaccttcaccaaccagatccacaagtggtcgcacacgtactttgggctgccacgctgggtcaccctcctgcaggactggcatgtcatcctgccacgtaaacaccatcgcatccaccacgtctcaccccacgagacctacttctgcatcaccacaggagtaaaagtccctcgcaatttccgactgttggaagaactcgaagaaggccagaaaggagtaggagatggcacagttagctggggtctagaagatgacgaagacatgacacttacaagatggacagggatgataattgggcctccaagaacaatttatgaaaaccgaatatacagccttaaaatagaatgtggacctaaatacccagaagcacccccctttgtaagatttgtaacaaaaattaatatgaatggagtaaatagttctaatggagtggtggacccaagagccatatcagtgctagcaaaatggcagaattcatatagcatcaaagttgtcctgcaagagcttcggcgcctaatgatgtctaaagaaaatatgaaactccctcagccgcccgaaggacagtgttacagcaattaatcaaaaagaaaaaccacaggcccttccccttccccccaattcgatttaatcagtcttcattttccacagtagtaaattttctagatacgtcttgtagacctcaaagtaccggaaaggaagctcccattcaaaggaaatttatcttaagatactgtaaatgatactaattttttgtccatttgaaatatataagttgtgctataacaaatcatcctgtcaagtgtaaccactgtccacgtagttgaacttctgggatcaagaaagtctatttaaattgattcccatcataactggtggggcacatctaactcaactgtgaaaagacacatcacacaatcaccttgctgctgattacacggcctggggtctctgccttctccctttaccctcccgcctcccaccctccctgcaacaacagccctctagcctggggggcttgttagagtagatgtgaaggtttcaggtcgcagcctgtgggactactgctaggtgtgtggggtgtttcgcctgcacccctggttcctttaagtcttaagtgatgccccttccaaaccatcatcctgtccccacgctcctccactcccgcccttggccgaagcatagattgtaacccctccactcccctctgagattggcttcggtgaggaattcagggctttccccatatcttctctccccccacctttatcgaggggtgctgctttttctccctcctcctcaagttcctttttgcaccgtcaccacccaacaccttccatgacacttccttgctttggccagaagccatcaggtaaggttggaaagagcctctgacctcccttgtttagttttggaaccatactcactcactctccaccagcctgggaaatgaatattgggtcctcagccctgccaccctctgctgtcatcagctgatgcattgtttttagctcaggttttgataaggtgaaaagaatagtcaccagggttactcagacctgccagctctcggagtccttggtggttgaacttggagaaagaccgcatgaagatacttgtaagcacacatgatccctctgaattgttttactttcctgtaactgcttttgcttttaaaaattgaagaagttttaaacagggctttcatttggtcatccttgcaatccattggggtctagtttggaatctgacaactggaacaaaaagaaccttgaatccggtgcatgccttggttttggtgctgctgctgcttcccaagatcctcagcagggattaagaaggaacccggtgtgcacagcagatccccgaaattggtgggcttgacctcctggcaaattgctgcgtctttccacttgctgttcaggaccactaaatgctgaaatgtggatgcataccgaaataaaagcaattcattgtgtactaaaggttttttttttttttttaatttagtatttgtgtaaaaccaccttttgaagcagcaactatcaagtctgaaaagcaattgatgtttccattaatctttttctggggggaaaaccttagttctaaggatttaacatcctgtaagtgaagtttaacataacagtattccataagcagcctttttattgtcagaccattgcctgattttaatataataaaaaaaaagtgtgcgttaataaaaaaaaaaaaaaaaaaaaa

SEQ ID NO: 5805 - protein, 221 aa, Homo sapiens
MAYKFRTHSPEALEQLYPWECFVFCLIIFGTFTNQIHKWSHTYFGLPRWVTLLQDWHVILPRKHHRIHHVSPHETYFCITTGVKVPRNFRLLEELEEGQKGVGDGTVSWGLEDDEDMTLTRWTGMIIGPPRTIYENRIYSLKIECGPKYPEAPPFVRFVTKINMNGVNSSNGVVDPRAISVLAKWQNSYSIKVVLQELRRLMMSKENMKLPQPPEGQCYSN

SEQ ID NO: 5806 - DNA, 2024 bp, Homo sapiens
atgccaggagaggttcaagcgtcttacctgaagtcacaaagcaaactgagtgatgaaggaagacttgaacctagaaaatttcactgcaaagacaatttatgaaaaccgaatatacagccttaaaatagaatgtggacctaaatacccagaagcacccccctttgtaagatttgtaacaaaaattaatatgaatggagtaaatagttctaatggagtggtggacccaagagccatatcagtgctagcaaaatggcagaattcatatagcatcaaagttgtcctgcaagagcttcggcgcctaatgatgtctaaagaaaatatgaaactccctcagccgcccgaaggacagtgttacagcaattaatcaaaaagaaaaaccacaggcccttccccttccccccaattcgatttaatcagtcttcattttccacagtagtaaattttctagatacgtcttgtagacctcaaagtaccggaaaggaagctcccattcaaaggaaatttatcttaagatactgtaaatgatactaattttttgtccatttgaaatatataagttgtgctataacaaatcatcctgtcaagtgtaaccactgtccacgtagttgaacttctgggatcaagaaagtctatttaaattgattcccatcataactggtggggcacatctaactcaactgtgaaaagacacatcacacaatcaccttgctgctgattacacggcctggggtctctgccttctccccttaccctcccgcctcccaccctccctgcaacaacagccctctagcctggggggcttgttagagtagatgtgaaggcttcaggtcgcagcctgtgggactactgctaggtgtgtggggtgtttcgcctgcacccctggtttctttaagtcttaagtgatgccccttccaaaccatcatcctgtccccacgctcctccactcccgcccttggccgaagcatagattgtaacccctccactcccctctgagattggccttcggtgaggaattcagggctttccccatatcttctctcccccacctttatcgaggggtgctgctttttctccctcctcctcaagttcctttttgcaccgtcaccacccaacaccttccatgacacttccttgctttggccagaagccatcaggtaaggttggaaagagcctctgacctcccttgtttagttttggaaccatactcactcactctccaccagcctgggaaatgaatattgggtcctcagccctgccaccctctgctgtcatcagctgatgcattgtttttagctcaggttttgataaggtgaaaagaatagtcaccagggttactcagacctgccagctctcggagtccttggtggttgaacttggagaaagaccgcatgaagatacttgtaagcacacatgatccctctgaattgttttactttcctgtaactgcttttgcttttaaaaattgaagaagttttaaacagggctttcatttggtcatccttgcaatccattgggggtctagtttggaatctgacaactggaacaaaaagaaccttgaacccggtgcatgccttggttttggtgctgctgctgcttcccaagatcctcagcagggattaagaaggaacccggtgtgcacagcagatccccgaaattggtgggcttgacctcctggcaaattgctgcgtctttccacttgctgttcaggaccactaaatgctgaaatgtggatgcataccgaaataaaagcaattcattgtgtactaaaggttttttttttttttttaatttagtatttgtgtaaaaccaccttttgaagcagcaactatcaagtctgaaaagcaattgatgtttccattaatctttttctggggggaaaaccttagttctaaggatttaacatcctgtaagtgaagtttaacataacagtattccataagcagcctttttattgtcagaccattgcctgattttaatataataaaaaaaaagtgtgcgttaataaaaaaaaaaaaaaaaaaaaa

SEQ ID NO: 5807 - protein, 103 aa, Homo sapiens
MKEDLNLENFTAKTIYENRIYSLKIECGPKYPEAPPFVRFVTKINMNGVNSSNGVVDPRAISVLAKWQNSYSIKVVLQELRRLMMSKENMKLPQPPEGQCYSN

SEQ ID NO: 5808 - DNA, 1038 bp, Homo sapiens
atgcaacgcctggtggcctgggacccagcatgtctccccctgccgccgccgccgcctgcctttaaatccatggaagtggccaacttctactacgaggcggactgcttggctgctgcgtacggcggcaaggcggcccccgcggcgccccccgcggccagacccgggccgcgcccccccgccggcgagctgggcagcatcggcgaccacgagcgcgccatcgacttcagcccgtacctggagccgctgggcgcgccgcaggccccggcgcccgccacggccacggacaccttcgaggcggctccgcccgcgcccgcccccgcgcccgcctcctccgggcagcaccacgacttcctctccgacctcttctccgacgactacgggggcaagaactgcaagaagccggccgagtacggctacgtgagcctggggcgcctgggggctgccaagggcgcgctgcaccccggctgcttcgcgcccctgcacccaccgcccccgccgccgccgccgcccgccgagctcaaggcggagccgggcttcgagcccgcggactgcaagcggaaggaggaggccggggcgccgggcggcggcgcaggcatggcggcgggcttcccgtacgcgctgcgcgcttacctcggctaccaggcggtgccgagcggcagcagcgggagcctctccacgtcctcctcgtccagcccgcccggcacgccgagccccgctgacgccaaggcccccccgaccgcctgctacgcgggggccgggccggcgccctcgcaggtcaagagcaaggccaagaagaccgtggacaagcacagcgacgagtacaagatccggcgcgagcgcaacaacatcgccgtgcgcaagagccgcgacaaggccaagatgcgcaacctggagacgcagcacaaggtcctggagctcacggccgagaacgagcggctgcagaagaaggtggagcagctgtcgcgcgagctcagcaccctgcggaacttgttcaagcagctgcccgagcccctgctcgcctcctccggccactgctag

SEQ ID NO: 5809 - DNA, 3318 bp, Homo sapiens
gtgatgcgtagttccggctgccggttgacatgaagaagcagcagcggctagggcggcggtagctgcaggggtcggggattgcagcgggcctcggggctaagagcgcgacgcggcctagagcggcagacggcgcagtgggccgagaaggaggcgcagcagccgccctggcccgtcatggagatggaaaaggagttcgagcagatcgacaagtccgggagctgggcggccatttaccaggatatccgacatgaagccagtgacttcccatgtagagtggccaagcttcctaagaacaaaaaccgaaataggtacagagacgtcagtccctttgaccatagtcggattaaactacatcaagaagataatgactatatcaacgctagtttgataaaaatggaagaagcccaaaggagttacattcttacccagggccctttgcctaacacatgcggtcacttttgggagatggtgtgggagcagaaaagcaggggtgtcgtcatgctcaacagagtgatggagaaaggttcgttaaaatgcgcacaatactggccacaaaaagaagaaaaagagatgatctttgaagacacaaatttgaaattaacattgatctctgaagatatcaagtcatattatacagtgcgacagctagaattggaaaaccttacaacccaagaaactcgagagatcttacatttccactataccacatggcctgactttggagtccctgaatcaccagcctcattcttgaactttcttttcaaagtccgagagtcagggtcactcagcccggagcacgggcccgttgtggtgcactgcagtgcaggcatcggcaggtctggaaccttctgtctggctgatacctgcctcttgctgatggacaagaggaaagacccttcttccgttgatatcaagaaagtgctgttagaaatgaggaagtttcggatggggctgatccagacagccgaccagctgcgcttctcctacctggctgtgatcgaaggtgccaaattcatcatgggggactcttccgtgcaggatcagtggaaggagctttcccacgaggacctggagcccccacccgagcatatccccccacctccccggccacccaaacgaatcctggagccacacaatgggaaatgcagggagttcttcccaaatcaccagtgggtgaaggaagagacccaggaggataaagactgccccatcaaggaagaaaaaggaagccccttaaatgccgcaccctacggcatcgaaagcatgagtcaagacactgaagttagaagtcgggtcgtggggggaagtcttcgaggtgcccaggctgcctccccagccaaaggggagccgtcactgcccgagaaggacgaggaccatgcactgagttactggaagcccttcctggtcaacatgtgcgtggctacggtcctcacggccggcgcttacctctgctacaggttcctgttcaacagcaacacatagcctgaccctcctccactccacctccacccactgtccgcctctgcccgcagagcccacgcccgactagcaggcatgccgcggtaggtaagggccgccggaccgcgtagagagccgggccccggacggacgttggttctgcactaaaacccatcttccccggatgtgtgtctcacccctcatccttttactttttgccccttccactttgagtaccaaatccacaagccattttttgaggagagtgaaagagagtaccatgctggcggcgcagagggaaggggcctacacccgtcttggggctcgccccacccagggctccctcctggagcatcccaggcgggcggcacgccaacagccccccccttgaatctgcagggagcaactctccactccatatttatttaaacaattttttccccaaaggcatccatagtgcactagcattttcttgaaccaataatgtattaaaattttttgatgtcagccttgcatcaagggctttatcaaaaagtacaataataaatcctcaggtagtactgggaatggaaggctttgccatgggcctgctgcgtcagaccagtactgggaaggaggacggttgtaagcagttgttatttagtgatattgtgggtaacgtgagaagatagaacaatgctataatatataatgaacacgtgggtatttaataagaaacatgatgtgagattactttgtcccgcttattctcctccctgttatctgctagatctagttctcaatcactgctcccccgtgtgtattagaatgcatgtaaggtcttcttgtgtcctgatgaaaaatatgtgcttgaaatgagaaactttgatctctgcttactaatgtgccccatgtccaagtccaacctgcctgtgcatgacctgatcattacatggctgtggttcctaagcctgttgctgaagtcattgtcgctcagcaatagggtgcagttttccaggaataggcatttgcctaattcctggcatgacactctagtgacttcctggtgaggcccagcctgtcctggtacagcagggtcttgctgtaactcagacattccaagggtatgggaagccatattcacacctcacgctctggacatgatttagggaagcagggacaccccccgccccccacctttgggatcagcctccgccattccaagtcaacactcttcttgagcagaccgtgatttggaagagaggcacctgctggaaaccacacttcttgaaacagcctgggtgacggtcctttaggcagcctgccgccgtctctgtcccggttcaccttgccgagagaggcgcgtctgccccaccctcaaaccctgtggggcctgatggtgctcacgactcttcctgcaaagggaactgaagacctccacattaagtggctttttaacatgaaaaacacggcagctgtagctcccgagctactctcttgccagcattttcacattttgcctttctcgtggtagaagccagtacagagaaattctgtggtgggaacattcgaggtgtcaccctgcagagctatggtgaggtgtggataaggcttaggtgccaggctgtaagcattctgagctgggcttgttgtttttaagtcctgtatatgtatgtagtagtttgggtgtgtatatatagtagcatttcaaaatggacgtactggtttaacctcctatccttggagagcagctggctctccaccttgttacacattatgttagagaggtagcgagctgctctgctatatgccttaagccaatatttactcatcaggtcattattttttacaatggccatggaataaaccatttttacaaaa

SEQ ID NO: 5810 - protein, 435 aa, Homo sapiens
MEMEKEFEQIDKSGSWAAIYQDIRHEASDFPCRVAKLPKNKNRNRYRDVSPFDHSRIKLHQEDNDYINASLIKMEEAQRSYILTQGPLPNTCGHFWEMVWEQKSRGVVMLNRVMEKGSLKCAQYWPQKEEKEMIFEDTNLKLTLISEDIKSYYTVRQLELENLTTQETREILHFHYTTWPDFGVPESPASFLNFLFKVRESGSLSPEHGPVVVHCSAGIGRSGTFCLADTCLLLMDKRKDPSSVDIKKVLLEMRKFRMGLIQTADQLRFSYLAVIEGAKFIMGDSSVQDQWKELSHEDLEPPPEHIPPPPRPPKRILEPHNGKCREFFPNHQWVKEETQEDKDCPIKEEKGSPLNAAPYGIESMSQDTEVRSRVVGGSLRGAQAASPAKGEPSLPEKDEDHALSYWKPFLVNMCVATVLTAGAYLCYRFLFNSNT

SEQ ID NO: 5811 - DNA, 1047 bp, Homo sapiens
atggcctccttggaagtcagtcgtagtcctcgcaggtctcggcgggagctggaagtgcgcagtccacgacagaacaaatattcggtgcttttacctacctacaacgagcgcgagaacctgccgctcatcgtgtggctgctggtgaaaagcttctccgagagtggaatcaactatgaaattataatcatagatgatggaagcccagatggaacaagggatgttgctgaacagttggagaagatctatgggtcagacagaattcttctaagaccacgagagaaaaagttgggactaggaactgcatatattcatggaatgaaacatgccacaggaaactacatcattattatggatgctgatctctcacaccatccaaaatttattcctgaatttattaggaagcaaaaggagggtaattttgatattgtctctggaactcgctacaaaggaaatggaggtgtatatggctgggatttgaaaagaaaaataatcagccgtggggccaattttttaactcagatcttgctgagaccaggagcatctgatttaacaggaagtttcagattataccgaaaagaagttctagagaaattaatagaaaaatgtgtttctaaaggctacgtcttccagatggagatgattgttcgggcaagacagttgaattatactattggcgaggttccaatatcatttgtggatcgtgtttatggtgaatccaagttgggaggaaatgaaatagtatctttcttgaaaggattattgactctttttgctactacataaaagaaagatactcatttatagttacgttcatttcaggttaaacatgaaagaagcctggttactgatttgtataaaatgtactcttaaagtataaaatataaggtaaggtaaatttcatgcatctttttatgaagaccacctattttatatttcaaattaaataattttaaagttgctggcctaatgagcaatgttctcaattttcgttttcattttgctgtattgagacctataaataaatgtatatttttttttgcataaagt

SEQ ID NO: 5812 - protein, 260 aa, Homo sapiens
MASLEVSRSPRRSRRELEVRSPRQNKYSVLLPTYNERENLPLIVWLLVKSFSESGINYEIIIIDDGSPDGTRDVAEQLEKIYGSDRILLRPREKKLGLGTAYIHGMKHATGNYIIIMDADLSHHPKFIPEFIRKQKEGNFDIVSGTRYKGNGGVYGWDLKRKIISRGANFLTQILLRPGASDLTGSFRLYRKEVLEKLIEKCVSKGYVFQMEMIVRARQLNYTIGEVPISFVDRVYGESKLGGNEIVSFLKGLLTLFATT

SEQ ID NO: 5813 - DNA, 2347 bp, Homo sapiens
ggaagacttgggtccttgggtcgcaggtgggagccgacgggtgggtagaccgtgggggatatctcagtggcggacgaggacggcggggacaaggggcggctggtcggagtggcggagcgtcaagtcccctgtcggttcctccgtccctgagtgtccttggcgctgccttgtgcccgcccagcgcctttgcatccgctcctgggcaccgaggcgccctgtaggatactgcttgttacttattacagctagagggtctcactccattgcccaggccagagtgcggggatatttgataagaaacttcagtgaaggccgggcgcggtggctcatgcccgtaatcccagcattttcggaggccgaggcatcatggaccgatctaaagaaaactgcatttcaggacctgttaaggctacagctccagttggaggtccaaaacgtgttctcgtgactcagcaatttccttgtcagaatccattacctgtaaatagtggccaggctcagcgggtcttgtgtccttcaaattcttcccagcgcattcctttgcaagcacaaaagcttgtctccagtcacaagccggttcagaatcagaagcagaagcaattgcaggcaaccagtgtacctcatcctgtctccaggccactgaataacacccaaaagagcaagcagcccctgccatcggcacctgaaaataatcctgaggaggaactggcatcaaaacagaaaaatgaagaatcaaaaaagaggcagtgggctttggaagactttgaaattggtcgccctctgggtaaaggaaagtttggtaatgtttatttggcaagagaaaagcaaagcaagtttattctggctcttaaagtgttatttaaagctcagctggagaaagccggagtggagcatcagctcagaagagaagtagaaatacagtcccaccttcggcatcctaatattcttagactgtatggttatttccatgatgctaccagagtctacctaattctggaatatgcaccacttggaacagtttatagagaacttcagaaactttcaaagtttgatgagcagagaactgctacttatataacagaattggcaaatgccctgtcttactgtcattcgaagagagttattcatagagacattaagccagagaacttacttcttggatcagctggagagcttaaaattgcagattttgggtggtcagtacatgctccatcttccaggaggaccactctctgtggcaccctggactacctgccccctgaaatgattgaaggtcggatgcatgatgagaaggtggatctctggagccttggagttctttgctatgaatttttagttgggaagcctccttttgaggcaaacacataccaagagacctacaaaagaatatcacgggttgaattcacattccctgactttgtaacagagggagccagggacctcatttcaagactgttgaagcataatcccagccagaggccaatgctcagagaagtacttgaacacccctggatcacagcaaattcatcaaaaccatcaaattgccaaaacaaagaatcagctagcaaacagtcttaggaatcgtgcagggggagaaatccttgagccagggctgccatataacctgacaggaacatgctactgaagtttattttaccattgactgctgccctcaatctagaacgctacacaagaaatatttgttttactcagcaggtgtgccttaacctccctattcagaaagctccacatcaataaacatgacactctgaagtgaaagtagccacgagaattgtgctacttatactggttcataatctggaggcaaggttcgactgcagccgccccgtcagcctgtgctaggcatggtgtcttcacaggaggcaaatccagagcctggctgtggggaaagtgaccactctgccctgaccccgatcagttaaggagctgtgcaataaccttcctagtacctgagtgagtgtgtaacttattgggttggcgaagcctggtaaagctgttggaatgagtatgtgattctttttaagtatgaaaataaagatatatgtacagacttgtattttttctctggtggcattcctttaggaatgctgtgtgtctgtccggcaccccggtaggcctgattgggtttctagtcctccttaaccacttatctcccatatgagagtgtgaaaaataggaacacgtgctctacctccatttagggatttgcttgggatacagaagaggccatgtgtctcagagctgttaagggcttatttttttaaaacattggagtcatagcatgtgtgtaaactttaaatatgcaaataaataagtatctatgtct

SEQ ID NO: 5814 - DNA, 1801 bp, Homo sapiens
agaggagtgggaccgatcgatagcgcagcggtcgcttggcgccctttcagcgtgcgcagtgaacgtgcgctcggagcggtagattgggcaggattcgcgcctccatttttccaggagagagcgggataccaagagaaccggaccagctgctggcagggaaactgtcttccttttctccaagatgtacagaaccaaagtgggcttgaaggaccgccagcagctctacaagctgatcattagccagctgctatatgacggctacatcagcatcgccaatggcctcatcaatgaaatcaagcctcagtctgtgtgtgcaccctcggagcagctcctgcatctcatcaaactcggaatggaaaacgatgacaccgcagttcagtatgcaattggtcgttcagatactgttgcccctggcacagggattgacctggaatttgatgcagatgttcagactatgtccccagaggcttctgagtacgaaacatgctatgtcacatcacataaaggaccatgccgtgtagctacctatagtagagatggacagttaatagctactgggtctgctgatgcttcgataaagatacttgacacagagaggatgttggccaaaagtgccatgccaatagaggtcatgatgaatgagaccgcacaacaaaatatggaaaaccacccagtgattcgaactctttatgaccatgtggatgaagtcacgtgccttgctttccacccaacagaacagatcctggcttctggttcaagggattatactcttaaattatttgattattccaaaccatcagcaaaaagagccttcaaatacattcaggaagctgaaatgttacgttccatctcttttcatccttctggagactttatacttgtcggaactcagcatcctactcttcgcctttatgatatcaacacctttcaatgttttgtctcttgcaatcctcaagatcaacacaccgatgctatatgttccgttaattacaattctagtgccaatatgtacgtaactggaagcaaggacggctgcatcaaattatgggatggtgtttcaaatcgatgcatcacaacttttgagaaagcacatgacggtgctgaagtttgttctgccattttttccaaaaattctaaatacattctctcaagtggaaaagactctgtagctaaactttgggaaatatcaacgggacgaacactggtcagatacacgggcgcgggtttaagtggacgccaggtgcaccggacacaggctgtgtttaaccacaccgaggactatgtgttgctgcccgacgagaggacgatcagtctttgctgctgggactcgaggacagccgagcggagaaacctgctgtcgttggggcacaacaatattgtacgctgcatagtgcactcccccaccaaccccgggttcatgacgtgcagcgatgacttcagagcgcggttttggtaccggagatcgaccactgactgagccaccctctccgtagggttctttctcgaggactctaccctcctcccccacgtcctgtctcagctgcagtcgtaagtccgtgcaccatccttgacgttttgctgccacctctgtccacattcttcttggatttgtataaaagaatctttttttaccttgatgtagaatcatggtggaaaaagttggaaacacagatctgtgcagttctacattcactgattattacagtgtgattttcatcggttttgtaagtacaggacttgccgtttcttttgatctcttgattgaaggaggatagggcattaaagtgcttttgacatgagg

SEQ ID NO: 5815 - protein, 431 aa, Homo sapiens
MYRTKVGLKDRQQLYKLIISQLLYDGYISIANGLINEIKPQSVCAPSEQLLHLIKLGMENDDTAVQYAIGRSDTVAPGTGIDLEFDADVQTMSPEASEYETCYVTSHKGPCRVATYSRDGQLIATGSADASIKILDTERMLAKSAMPIEVMMNETAQQNMENHPVIRTLYDHVDEVTCLAFHPTEQILASGSRDYTLKLFDYSKPSAKRAFKYIQEAEMLRSISFHPSGDFILVGTQHPTLRLYDINTFQCFVSCNPQDQHTDAICSVNYNSSANMYVTGSKDGCIKLWDGVSNRCITTFEKAHDGAEVCSAIFSKNSKYILSSGKDSVAKLWEISTGRTLVRYTGAGLSGRQVHRTQAVFNHTEDYVLLPDERTISLCCWDSRTAERRNLLSLGHNNIVRCIVHSPTNPGFMTCSDDFRARFWYRRSTTD

SEQ ID NO: 5816 - DNA, 1607 bp, Homo sapiens
ggatttcgccggaaatcccggaagtgacagctttgggggtttgctgctggctctgactcccgtcctgcgatgggttgcgacgggggaacaatccccaagaggcatgaactggtgaaggggccgaagaaggttgagaaggtcgacaaagatgctgaattagtggcccaatggaactattgtactctaagtcaggaaatattaagacgaccaatagttgcctgtgaacttggcagactttataacaaagatgccgtcattgaatttctcttggacaaatctgcagaaaaggctcttgggaaggcagcatctcacattaaaagcattaagaatgtgacagagctgaagctttctgataatcctgcctgggaaggggataaaggaaacactaaaggtgacaagcacgatgacctccagcgggcgcgtttcatctgccccgttgtgggcctggagatgaacggccgacacaggttctgcttccttcggtgctgcggctgtgtgttttctgagcgagccttgaaagagataaaagcggaagtttgccacacgtgtggggctgccttccaggaggatgatgtcatcatgctcaatggcaccaaggaggatgtggacgtgctgaagacaaggatggaggagagaaggctgagagcgaagctggaaaagaaaacaaagaaacccaaggcagcagagtctgtttcaaaaccagatgtcagtgaagaagccccagggccatcaaaagttaagacagggaagcctgaagaagccagccttgattctagagagaagaaaaccaacttggctcccaaaagcacagcaatgaatgagagctcttctggaaaagctgggaagcctccgtgtggagccacaaagaggtccatcgctgacagtgaagaatcggaggcctacaagtccctctttaccactcacagctccgccaagcgctccaaggaggagtctgcccactgggtcacccacacgtcctactgcttctgaagcccgcactgccaccgctcctgccccagaaggttgtttagtttccacgtaggcaggtcgctttgtgcctctgagtgcgctgctgtgtgttctctctatagttctgtgtcataaagctgtcctggccagccttcaagctggtgtggccactcttgatgtgaggcgtgtcggttccaggggggacatgggaggggctgcacagtggcccgaggtcatgcttgcttccacctgcaggtgcatttggtcctttccatggccaggaagccctgtgggctgcactttttatgcttgcagtaacaagagactccagagtcctcaccggtgcagagttggcacatattaattaactaaaattctaatgatcttgctaccagcaataaatcaagtaggccaagtgaaactgggctttaaaaaggatggatttcaaatacactgtgcccactagaagcttcgaagggcctcgtccctctgctacagccctgggaggagccaggatccttgttggtctagctaaatactgttaggggagtgtgccccatctcatcatttcgaagatagcagagtcatagttgggcacccagtgattgggttcaaaaataaagctggtctgcctcttc

SEQ ID NO: 5817 - protein, 306 aa, Homo sapiens
MGCDGGTIPKRHELVKGPKKVEKVDKDAELVAQWNYCTLSQEILRRPIVACELGRLYNKDAVIEFLLDKSAEKALGKAASHIKSIKNVTELKLSDNPAWEGDKGNTKGDKHDDLQRARFICPVVGLEMNGRHRFCFLRCCGCVFSERALKEIKAEVCHTCGAAFQEDDVIMLNGTKEDVDVLKTRMEERRLRAKLEKKTKKPKAAESVSKPDVSEEAPGPSKVKTGKPEEASLDSREKKTNLAPKSTAMNESSSGKAGKPPCGATKRSIADSEESEAYKSLFTTHSSAKRSKEESAHWVTHTSYCF

SEQ ID NO: 5818 - DNA, 2263 bp, Homo sapiens
ccgaggcggcctcttgtgcgatccagggcgcacaaggctgggagagcgccccggggcccctgctatccgcgccggaggttggaagagggtgggttgccgccgcccgagggcgagagcgccagaggagcgggaagaaggagcgctcgcccgcccgcctgcctcctcgctgcctccccggcgttggctctctggactcctaggcttgctggctgctcctcccacccgcgcccgcctcctcactcgccttttcgttcgccggggctgctttccaagccctgcggtgcgcccgggcgagtgcggggcgaggggcccggggccagcaccgagcagggggcgggggtccgggcagagcgcggccggccggggaggggccatgtctggcgcgggcgcagcggggcccgtctgcagcaagtgaccgagcggcgcggacggccgcctgccccctctgccacctggggcggtgcgggcccggagcccggagcccgggtagcgcgtagagccggcgcgatgcacgtgcgctcactgcgagctgcggcgccgcacagcttcgtggcgctctgggcacccctgttcctgctgcgctccgccctggccgacttcagcctggacaacgaggtgcactcgagcttcatccaccggcgcctccgcagccaggagcggcgggagatgcagcgcgagatcctctccattttgggcttgccccaccgcccgcgcccgcacctccagggcaagcacaactcggcacccatgttcatgctggacctgtacaacgccatggcggtggaggagggcggcgggcccggcggccagggcttctcctacccctacaaggccgtcttcagtacccagggcccccctctggccagcctgcaagatagccatttcctcaccgacgccgacatggtcatgagcttcgtcaacctcgtggaacatgacaaggaattcttccacccacgctaccaccatcgagagttccggtttgatctttccaagatcccagaaggggaagctgtcacggcagccgaattccggatctacaaggactacatccgggaacgcttcgacaatgagacgttccggatcagcgtttatcaggtgctccaggagcacttgggcagggaatcggatctcttcctgctcgacagccgtaccctctgggcctcggaggagggctggctggtgtttgacatcacagccaccagcaaccactgggtggtcaatccgcggcacaacctgggcctgcagctctcggtggagacgctggatgggcagagcatcaaccccaagttggcgggcctgattgggcggcacgggccccagaacaagcagcccttcatggtggctttcttcaaggccacggaggtccacttccgcagcatccggtccacggggagcaaacagcgcagccagaaccgctccaagacgcccaagaaccaggaagccctgcggatggccaacgtggcagagaacagcagcagcgaccagaggcaggcctgtaagaagcacgagctgtatgtcagcttccgagacctgggctggcaggactggatcatcgcgcctgaaggctacgccgcctactactgtgagggggagtgtgccttccctctgaactcctacatgaacgccaccaaccacgccatcgtgcagacgctggtccacttcatcaacccggaaacggtgcccaagccctgctgtgcgcccacgcagctcaatgccatctccgtcctctacttcgatgacagctccaacgtcatcctgaagaaatacagaaacatggtggtccgggcctgtggctgccactagctcctccgagaattcagaccctttggggccaagtttttctggatcctccattgctcgccttggccaggaaccagcagaccaactgccttttgtgagaccttcccctccctatccccaactttaaaggtgtgagagtattaggaaacatgagcagcatatggcttttgatcagtttttcagtggcagcatccaatgaacaagatcctacaagctgtgcaggcaaaacctagcaggaaaaaaaaacaacgcataaagaaaaatggccgggccaggtcattggctgggaagtctcagccatgcacggactcgtttccagaggtaattatgagcgcctaccagccaggccacccagccgtgggaggaagggggcgtggcaaggggtgggcacattggtgtctgtgcgaaaggaaaattgacccggaagttcctgtaataaatgtcacaataaaacgaatgaatg

SEQ ID NO: 5819 - DNA, 1115 bp, Homo sapiens
agccactgcagtacattgagctccatagagacagcgccggggcaagtgagagccgtacgggcactgggcgactctgtgcctcgctgaagaaaaataactaaacatgggcaaaggagatcctaagaagccgagaggcaaaatgtcatcatatgcattttttgtgcaaacttgtcgggaggagcataagaagaagcactcagatgcttcagtcaacttctcagagttttctaacaagtgcccattatgaaagacaaatgaaaacctatatccctcccaaaggggagacaaaaaagaagttcaaggatcccaatgcacccaagaggcctccttcggccttcttcctgttctgctctgagtatcacccaaaaatcaaaggagaacatcctggcctgtccattggtgatgttgcgaagaaactgggagagatgtggaataacactgctgcagatgacaagcagcctggtgaaaagaaggctgcgaagctgaaggaaaaatacgaaaaggatattgctgcatatcaagctaaaggaaagcctgaggcagcaaaaaagggagttgtcaaagctgaaaaaagcaagaaaaagaaggaagaggaggaagatgaggaagatgaagaggatgaggaggaggaagatgaagaagatgaagaagatgatgatgatgaataagttggctctagcgcagttttttttcttgtcttaaagcatttaacgcccctgtacacaactcactccttttaaagaaaaaaattgaaatgtaaggctgtgtaagatttgtttttaaactgtacagtgtcgttttttgtatggttaatacactaccaaatgtgtctttagatggccctgtcctggtggtattttcaatagtcactaaccttgcctggtagagtatgggggttgtaaattggcatggaaatttaaagcaggttcttgttggtgcgcagcacaaattagttatatatggggatggtagttttttcatcttcagttgtctctgatgcagcttatacgaaataattgttctgttaactgaataccactctgtaattgcaaaaaaaaaaagttgcagctgttttgttgacattctgaatgcttctaagtaaatacaattttttt

SEQ ID NO: 5820 - protein, 187 aa, Homo sapiens
MGKGDPKKPRGKMSSYAFFVQTCREEHKKKHSDASVNFSEFSNKCHYERQMKTYIPPKGETKKKFKDPNAPKRPPSAFFLFCSEYHPKIKGEHPGLSIGDVAKKLGEMWNNTAADDKQPGEKKAAKLKEKYEKDIAAYQAKGKPEAAKKGVVKAEKSKKKKEEEEDEEDEEDEEEEDEEDEEDDDDE

SEQ ID NO: 5821 - DNA, 2684 bp, Homo sapiens
tttaaagctgggaggttctgccaccaagcacggccttcccactgggaacacaaacttgctggcgggaagagcccggaaagaaacctgtggatctcccttcgagatcatccaaagagaagaaaggtgacctcacattcgtgccccttagcagcactctgcagaaatgcctcctcagctgcaaaacggcctgaacctctcggccaaagttgtccagggaagcctggacagcctaccccaggcagtgagggagtttctcgagaataacgctgagctgtgtcagcctgatcacatccacatctgtgacggctctgaggaggagaatgggcggcttctgggccagatggaggaagagggcatcctcaggcggctgaagaagtatgacaactgctggttggctctcactgaccccagggatgtggccaggatcgaaagcaagacggttatcgtcacccaagagcaaagagacacagtgcccatccccaaaacaggcctcagccagctcggtcgctggatgtcagaggaggattttgagaaagcgttcaatgccaggttcccagggtgcatgaaaggtcgcaccatgtacgtcatcccattcagcatggggccgctgggctcgcctctgtcaaagatcggcatcgagctgacggattcaccctacgtggtggccagcatgcggatcatgacgcggatgggcacgcccgtcctggaagcagtgggcgatggggagtttgtcaaatgcctccattctgtggggtgccctctgcctttacaaaagcctttggtcaacaactggccctgcaacccggagctgacgctcatcgcccacctgcctgaccgcagagagatcatctcctttggcagtgggtacggcgggaactcgctgctcgggaagaagtgctttgctctcaggatggccagccggctggccaaggaggaagggtggctggcagagcacatgctgattctgggtataaccaaccctgagggtgagaagaagtacctggcggccgcatttcccagcgcctgcgggaagaccaacctggccatgatgaaccccagcctccccgggtggaaggttgagtgcgtcggggatgacattgcctggatgaagtttgacgcacaaggtcatttaagggccatcaacccagaaaatggctttttcggtgtcgctcctgggacttcagtgaagaccaaccccaatgccatcaagaccatccagaagaacacaatctttaccaatgtggccgagaccagcgacgggggcgtttactgggaaggcattgatgagccgctagcttcaggtgtcaccatcacgtcctggaagaataaggagtggagctcagaggatggggaaccttgtgcccaccccaactcgaggttctgcacccctgccagccagtgccccatcattgatgctgcctgggagtctccggaaggtgttcccattgaaggcattatctttggaggccgtagacctgctggtgtccctctagtctatgaagctctcagctggcaacatggagtctttgtgggggcggccatgagatcagaggccacagcggctgcagaacataaaggcaaaatcatcatgcatgacccctttgccatgcggcccttctttggctacaacttcggcaaatacctggcccactggcttagcatggcccagcacccagcagccaaactgcccaagatcttccatgtcaactggttccggaaggacaaggaaggcaaattcctctggccaggctttggagagaactccagggtgctggagtggatgttcaaccggatcgatggaaaagccagcaccaagctcacgcccataggctacatccccaaggaggatgccctgaacctgaaaggcctggggcacatcaacatgatggagcttttcagcatctccaaggaattctgggagaaggaggtggaagacatcgagaagtatctggaggatcaagtcaatgccgacctcccctgtgaaatcgagagagagatccttgccttgaagcaaagaataagccagatgtaatcagggcctgagtgctttacctttaaaatcattccctttcccatccataaggtgcagtaggagcaagagagggcaagtgttcccaaattgacgccaccataataatcatcaccacaccgtgagcagatctgaaaggcacactttgatttttttaaggataagaaccacagaacactgggtagtagctaatgaaattgagaagggaaatcttagcatgcctccaaaaattcacatccaatgcatagtttgttcaaatttaaggttactcaggcattgatcttttcagtgttttttcactttagctatgtggattagctagaatgcacaccaaaaaaatacttgagctgtatatatatatgtgtgtgtgtgtgtgtgtgtgtgtgtgtgtgtgtgcatgtatgtgcacatgtgtctgtgtggtatatttgtgtatgtgtatttgtatgtactgttattgaaaatatatttaatacctttggaaaaatcttgggcaagatgacctactagttttccttgaaaaaaagttgctttgttattaatattgtgcttaaattatttttatacaccattgttccttacctttacataattgcaatatttcccccttactacttcttggaaaaaaattacaaaatgaagttttatagaaaag

SEQ ID NO: 5822 - protein, 622 aa, Homo sapiens
MPPQLQNGLNLSAKVVQGSLDSLPQAVREFLENNAELCQPDHIHICDGSEEENGRLLGQMEEEGILRRLKKYDNCWLALTDPRDVARIESKTVIVTQEQRDTVPIPKTGLSQLGRWMSEEDFEKAFNARFPGCMKGRTMYVIPFSMGPLGSPLSKIGIELTDSPYVVASMRIMTRMGTPVLEAVGDGEFVKCLHSVGCPLPLQKPLVNNWPCNPELTLIAHLPDRREIISFGSGYGGNSLLGKKCFALRMASRLAKEEGWLAEHMLILGITNPEGEKKYLAAAFPSACGKTNLAMMNPSLPGWKVECVGDDIAWMKFDAQGHLRAINPENGFFGVAPGTSVKTNPNAIKTIQKNTIFTNVAETSDGGVYWEGIDEPLASGVTITSWKNKEWSSEDGEPCAHPNSRFCTPASQCPIIDAAWESPEGVPIEGIIFGGRRPAGVPLVYEALSWQHGVFVGAAMRSEATAAAEHKGKIIMHDPFAMRPFFGYNFGKYLAHWLSMAQHPAAKLPKIFHVNWFRKDKEGKFLWPGFGENSRVLEWMFNRIDGKASTKLTPIGYIPKEDALNLKGLGHINMMELFSISKEFWEKEVEDIEKYLEDQVNADLPCEIEREILALKQRISQM

SEQ ID NO: 5823 - DNA, 4911 bp, Homo sapiens
aacccgatctccttggacttgaatgaggaggaggaggcggcggcggcggcggcggcggaggcgctcggctggggaaagctagcggcagaggctcagccccggcggcagcgcgcgccccgctgccagcccattttccggacgccacccgcgggcactgccgacgcccccggggctgccgaggggaggccgggggggcgcagcggagcgcggtcccgcgcactgagccccgcggcgccccgggaacttggcggcgacccgagcccggcgagccggggcgcgcctcccccgccgcgcgcctcctgcatgcggggccccagctccgggcgccggccggagccccccccggccgcccccgagccccccgcgccccgcgccgcgccgccgcgccgtccatgcaccgcttgatgggggtcaacagcaccgccgccgccgccgccgggcagcccaatgtctcctgcacgtgcaactgcaaacgctctttgttccagagcatggagatcacggagctggagtttgttcagatcatcatcatcgtggtggtgatgatggtgatggtggtggtgatcacgtgcctgctgagccactacaagctgtctgcacggtccttcatcagccggcacagccaggggcggaggagagaagatgccctgtcctcagaaggatgcctgtggccctcggagagcacagtgtcaggcaacggaatcccagagccgcaggtctacgccccgcctcggcccaccgaccgcctggccgtgccgcccttcgcccagcgggagcgcttccaccgcttccagcccacctatccgtacctgcagcacgagatcgacctgccacccaccatctcgctgtcagacggggaggagcccccaccctaccagggcccctgcaccctccagcttcgggaccccgagcagcagctggaactgaaccgggagtcggtgcgcgcacccccaaacagaaccatcttcgacagtgacctgatggatagtgccaggctgggcggcccctgcccccccagcagtaactcgggcatcagcgccacgtgctacggcagcggcgggcgcatggaggggccgccgcccacctacagcgaggtcatcggccactacccggggtcctccttccagcaccagcagagcagtgggccgccctccttgctggaggggacccggctccaccacacacacatcgcgcccctagagagcgcagccatctggagcaaagagaaggataaacagaaaggacaccctctctagggtccccaggggggccgggctggggctgcgtaggtgaaaaggcagaacactccgcgcttcttagaagaggagtgagaggaaggcggggggcgcagcaacgcatcgtgtggccctcccctcccacctccctgtgtataaatatttacatgtgatgtctggtctgaatgcacaagctaagagagcttgcaaaaaaaaaaagaaaaaagaaaaaaaaaaaccacgtttctttgttgagctgtgtcttgaaggcaaaagaaaaaaaatttctacagtagtctttcttgtttctagttgagctgcgtgcgtgaatgcttattttcttttgtttatgataatttcacttaactttaaagacatatttgcacaaaacctttgtttaaagatctgcaatattatatatataaatatatataagataagagaaactgtatgtgcgagggcaggagtatttttgtattagaagaggcctattaaaaaaaaaagttgttttctgaactagaagaggaaaaaaatggcaatttttgagtgccaagtcagaaagtgtgtattaccttgtaaagaaaaaaattacaaagcaggggtttagagttatttatataaatgttgagattttgcactattttttaatataaatatgtcagtgcttgcttgatggaaacttctcttgtgtctgttgagactttaagggagaaatgtcggaatttcagagtcgcctgacggcagagggtgagcccccgtggagtctgcagagaggccttggccaggagcggcgggctttcccgaggggccactgtccctgcagagtggatgcttctgcctagtgacaggttatcaccacgttatatattccctaccgaaggagacaccttttcccccctgacccagaacagcctttaaatcacaagcaaaataggaaagttaaccacggaggcaccgagttccaggtagtggttttgcctttcccaaaaatgaaaataaactgttaccgaaggaattagtttttcctcttcttttttccaactgtgaaggtccccgtggggtggagcatggtgcccctcacaagccgcagcggctggtgcccgggctaccagggacatgccagagggctcgatgacttgtctctgcagggcgctttggtggttgttcagctggctaaaggttcaccggtgaaggcaggtgcggtaactgccgcactggaccctaggaagccccaggtattcgcaatctgacctcctcctgtctgtttcccttcacggatcaattctcacttaagaggccaataaacaacccaacatgaaaaggtgacaagcctgggtttctcccaggataggtgaaagggttaaaatgagtaaagcagttgagcaaacaccaacccgagcttcgggcgcagaattcttcaccttctcttcccctttccatctcctttccccgcggaaacaacgcttcccttctggtgtgtctgttgatctgtgttttcatttacatctctcttagactccgctcttgttctccaggttttcaccagatagatttggggttggcgggacctgctggtgacgtgcaggtgaaggacaggaaggggcatgtgagcgtaaatagaggtgaccagaggagagcatgaggggtggggctttgggacccaccggggccagtggctggagcttgacgtctttcctccccatgggggtgggagggcccccagctggaagagcagactcccagctgctaccccctcccttcccatgggagtggctttccattttgggcagaatgctgactagtagactaacataaaagatataaaaggcaataactattgtttgtgagcaacttttttataacttccaaaacaaaaacctgagcacagttttgaagttctagccactcgagctcatgcatgtgaaacgtgtgctttacgaaggtggcagctgacagacgtgggctctgcatgccgccagcctagtagaaagttctcgttcattggcaacagcagaacctgcctctccgtgaagtcgtcagcctaaaatttgtttctctcttgaagaggattctttgaaaaggtcctgcagagaaatcagtacaggttatcccgaaaggtacaaggacgcacttgtaaagatgattaaaacgtatctttcctttatgtgacgcgtctctagtgccttactgaagaagcagtgacactcccgtcgctcggtgaggacgttcccggacagtgcctcactcacctgggactggtatcccctcccagggtccaccaagggctcctgcttttcagacaccccatcatcctcgcgcgtcctcaccctgtctctaccagggaggtgcctagcttggtgaggttactcctgctcctccaacctttttttgccaaggtttgtacacgactcccatctaggctgaaaacctagaagtggaccttgtgtgtgtgcatggtgtcagcccaaagccaggctgagacagtcctcatatcctcttgagccaaactgtttgggtctcgttgcttcatggtatggtctggatttgtgggaatggctttgcgtgagaaaggggaggagagtggttgctgccctcagccggcttgaggacagagcctgtccctctcatgacaactcagtgttgaagcccagtgtcctcagcttcatgtccagtggatggcagaagttcatggggtagtggcctctcaaaggctgggcgcatcccaagacagccagcaggttgtctctggaaacgaccagagttaagctctcggcttctctgctgagggtgcaccctttcctctagatggtagttgtcacgttatctttgaaaactcttggactgctcctgaggaggccctcttttccagtaggaagttagatgggggttctcagaagtggctgattggaaggggacaagcttcgtttcaggggtctgccgttccatcctggttcagagaaggccgagcgtggctttctctagccttgtcactgtctccctgcctgtcaatcaccacctttcctccagaggaggaaaattatctcccctgcaaagcccggttctacacagatttcacaaattgtgctaagaaccgtccgtgttctcagaaagcccagtgtttttgcaaagaatgaaaagggaccccatatgtagcaaaaatcagggctgggggagagccgggttcattccctgtcctcattggtcgtccctatgaattgtacgtttcagagaaattttttttcctatgtgcaacacgaagcttccagaaccataaaatatcccgtcgataaggaaagaaaatgtcgttgttgttgtttttctggaaactgcttgaaatcttgctgtactatagagctcagaaggacacagcccgtcctcccctgcctgcctgattccatggctgttgtgctgattccaatgctttcacgttggttcctggcgtgggaactgctctcctttgcagccccatttcccaagctctgttcaagttaaacttatgtaagctttccgtggcatgcggggcgcgcacccacgtccccgctgcgtaagactctgtatttggatgccaatccacaggcctgaagaaactgcttgttgtgtatcagtaatcattagtggcaatgatgacattctgaaaagctgcaatacttatacaataaattttacaattctttgg

SEQ ID NO: 5824 - DNA, 2195 bp, Homo sapiens
gcgcgcccacccggtagaggacccccgcccgtgccccgaccggtccccgcctttttgtaaaacttaaagcgggcgcagcattaacgcttcccgccccggtgacctctcaggggtctccccgccaaaggtgctccgccgctaaggaacatggcgaaggtggagcaggtcctgagcctcgagccgcagcacgagctcaaattccgaggtcccttcaccgatgttgtcaccaccaacctaaagcttggcaacccgacagaccgaaatgtgtgttttaaggtgaagactacagcaccacgtaggtactgtgtgaggcccaacagcggaatcatcgatgcaggggcctcaattaatgtatctgtgatgttacagcctttcgattatgatcccaatgagaaaagtaaacacaagtttatggttcagtctatgtttgctccaactgacacttcagatatggaagcagtatggaaggaggcaaaaccggaagaccttatggattcaaaacttagatgtgtgtttgaattgccagcagagaatgataaaccacatgatgtagaaataaataaaattatatccacaactgcatcaaagacagaaacaccaatagtgtctaagtctctgagttcttctttggatgacaccgaagttaagaaggttatggaagaatgtaagaggctgcaaggtgaagttcagaggctacgggaggagaacaagcagttcaaggaagaagatggactgcggatgaggaagacagtgcagagcaacagccccatttcagcattagccccaactgggaaggaagaaggccttagcacccggctcttggctctggtggttttgttctttatcgttggtgtaattattgggaagattgccttgtagaggtagcatgcacaggatggtaaattggattggtggatccaccatatcatgggatttaaatttatcataaccatgtgtaaaaagaaattaatgtatgatgacatctcacaggtcttgcctttaaattacccctccctgcacacacatacacagatacacacacacaaatataatgtaacgatcttttagaaagttaaaaatgtatagtaactgattgagggggaaaagaatgatctttattaatgacaagggaaaccatgagtaatgccacaatggcatattgtaaatgtcattttaaacattggtaggccttggtacatgatgctggattacctctcttaaaatgacacccttcctcgcctgttggtgctggcccttggggagctggagcccagcatgctggggagtgcggtcagctccacacagtagtccccacgtggcccactcccggcccaggctgctttccgtgtcttcagttctgtccaagccatcagctccttgggactgatgaacagagtcagaagcccaaaggaattgcactgtggcagcatcagacgtactcgtcataagtgagaggcgtgtgttgactgattgacccagcgctttggaaataaatggcagtgctttgttcacttaaagggaccaagctaaatttgtattggttcatgtagtgaagtcaaactgttattcagagatgtttaatgcatatttaacttatttaatgtatttcatctcatgttttcttattgtcacaagagtacagttaatgctgcgtgctgctgaactctgttgggtgaactggtattgctgctggagggctgtgggctcctctgtctctggagagtctggtcatgtggaggtggggtttattgggatgctggagaagagctgccaggaagtgttttttctgggtcagtaaataacaactgtcataggcagggaaattctcagtagtgacagtcaactctaggttaccttttttaatgaagagtagtcagtcttctagattgttcttataccacctctcaaccattactcacacttccagcgcccaggtccaagtttgagcctgacctccccttggggacctagcctggagtcaggacaaatggatcgggctgcaaagggttagaagcgagggcaccagcagttgtgggtggggagcaagggaagagagaaactcttcagcgaatccttctagtactagttgagagtttgactgtgaattaattttatgccataaaagaccaacccagttctgtttgactatgtagcatcttgaaaagaaaaattataataaagccccaaaattaaga

SEQ ID NO: 5825 - protein, 243 aa, Homo sapiens
MAKVEQVLSLEPQHELKFRGPFTDVVTTNLKLGNPTDRNVCFKVKTTAPRRYCVRPNSGIIDAGASINVSVMLQPFDYDPNEKSKHKFMVQSMFAPTDTSDMEAVWKEAKPEDLMDSKLRCVFELPAENDKPHDVEINKIISTTASKTETPIVSKSLSSSLDDTEVKKVMEECKRLQGEVQRLREENKQFKEEDGLRMRKTVQSNSPISALAPTGKEEGLSTRLLALVVLFFIVGVIIGKIAL

SEQ ID NO: 5826 - DNA, 2566 bp, Homo sapiens
ctcgcctcagtctcctctgtcctctcccaggcaagaggaccggcggaggcacctctctcgagtcttaggctgcggaatctaagactcagcgagaggagcccgggaggagacagaactttccccttttttcccatcccttcttcttgctcagagaggcaagcaaggcgcggagctttagaaagttcttaagtggtcaggaaggtaggtgcttccctttttctcctcacaaggaggtgaggctgggacctccgggccagcttctcacctcatagggtgtacctttcccggctccagcagccaatgtgcttcggagccgctctctgcagagccagagggcaggccggcttctcggtgtgtgcctaagaggatggatcggaggtcccgggctcagcagtggcgccgagctcgccataattacaacgacctgtgcccgcccataggccgccgggcagccaccgcgctcctctggctctcctgctccatcgcgctcctccgcgcccttgccacctccaacgcccgtgcccagcagcgcgcggctgcccaacagcgccggagcttccttaacgcccaccaccgctccggcgcccaggtattccctgagtcccccgaatcggaatctgaccacgagcacgaggaggcagaccttgagctgtccctccccgagtgcctagagtacgaggaagagttcgactacgagaccgagagcgagaccgagtccgaaatcgagtccgagaccgacttcgagaccgagcctgagaccgcccccaccactgagcccgagaccgagcctgaagacgatcgcggcccggtggtgcccaagcactccaccttcggccagtccctcacccagcgtctgcacgctctcaagttgcgaagccccgacgcctccccaagtcgcgcgccgcccagcactcaggagccccagagccccagggaaggggaggagctcaagcccgaggacaaagatccaagggaccccgaagagtcgaaggagcccaaggaggagaagcagcggcgtcgctgcaagccaaagaagcccacccgccgtgacgcgtccccggagtccccttccaaaaagggacccatccccatccggcgtcactaatggaggacgccgtccagattctccttgttttcatggattcaggtgctggagaatctggtaaaagcaccattgtgaagcagatgaggatcctgcatgttaatgggtttaatggagagggcggcgaagaggacccgcaggctgcaaggagcaacagcgatggcagtgagaaggcaaccaaagtgcaggacatcaaaaacaacctgaaagaggcgattgaaaccattgtggccgccatgagcaacctggtgccccccgtggagctggccaaccccgagaaccagttcagagtggactacatcctgagtgtgatgaacgtgcctgactttgacttccctcccgaattctatgagcatgccaaggctctgtgggaggatgaaggagtgcgtgcctgctacgaacgctccaacgagtaccagctgattgactgtgcccagtacttcctggacaagatcgacgtgatcaagcaggctgactatgtgccgagcgatcaggacctgcttcgctgccgtgtcctgacttctggaatctttgagaccaagttccaggtggacaaagtcaacttccacatgtttgacgtgggtggccagcgcgatgaacgccgcaagtggatccagtgcttcaacgatgtgactgccatcatcttcgtggtggccagcagcagctacaacatggtcatccgggaggacaaccagaccaaccgcctgcaggaggctctgaacctcttcaagagcatctggaacaacagatggctgcgcaccatctctgtgatcctgttcctcaacaagcaagatctgctcgctgagaaagtccttgctgggaaatcgaagattgaggactactttccagaatttgctcgctacactactcctgaggatgctactcccgagcccggagaggacccacgcgtgacccgggccaagtacttcattcgagatgagtttctgaggatcagcactgccagtggagatgggcgtcactactgctaccctcatttcacctgcgctgtggacactgagaacatccgccgtgtgttcaacgactgccgtgacatcattcagcgcatgcaccttcgtcagtacgagctgctctaagaagggaacccccaaatttaattaaagccttaagcacaattaattaaaagtgaaacgtaattgtacaagcagttaatcacccaccatagggcatgattaacaaagcaacctttcccttcccccgagtgattttgcgaaacccccttttcccttcagcttgcttagatgttccaaatttagaaagcttaaggcggcctacagaaaaaggaaaaaaggccacaaaagttccctctcactttcagtaaaaataaataaaacagcagcagcaaacaaataaaatgaaataaaagaaacaaatgaaataaatattgtgttgtgcagcattaaaaaaaatcaaaataaaaattaaatgtgagcaaagaaaaaaaaa

SEQ ID NO: 5827 - protein, 245 aa, Homo sapiens
MDRRSRAQQWRRARHNYNDLCPPIGRRAATALLWLSCSIALLRALATSNARAQQRAAAQQRRSFLNAHHRSGAQVFPESPESESDHEHEEADLELSLPECLEYEEEFDYETESETESEIESETDFETEPETAPTTEPETEPEDDRGPVVPKHSTFGQSLTQRLHALKLRSPDASPSRAPPSTQEPQSPREGEELKPEDKDPRDPEESKEPKEEKQRRRCKPKKPTRRDASPESPSKKGPIPIRRH

SEQ ID NO: 5828 - DNA, 3091 bp, Homo sapiens
atgcaggccttgaggcttcggccagcactcatggagcccggagccttcagtggtgccagaccaggcctgggaggatacagccctccaccagaagaagctatgccctttgagtttgaccagcctgcccagagaggctgcagtcaacttctcttacaggtcccagaccttgctccaggaggcccaggtgctgcaggggtccccggagctcctcccgaggagccccaagccctcaggcctgcaaaggctggctccagaggaggctacagccctccccctgaggagactatgccatttgagcttgatggagaaggatttggggacgacagcccacccccggggctttcccgagttatcgcacaagtcgacggcagcagccagttcgcggcagtcgcggcctcgagtgcggtccgcctcactcccgccgcgaacgcgcctcccctctgggtcccaggcgccatcggcagcccatcccaagaggctgtcagacctccttctaacttcacgggcagcagcccctggatggagatctccggacccccgttcgagattggcagcgcccccgctggggtcgacgacactcccgtcaacatggacagccccccaatcgcgcttgacggcccgcccatcaaggtctccggagccccagataagagagagcgagcagagagacccccagttgaggaggaagcagcagagatggaaggagccgctgatgccgcggagggaggaaaagtaccctctccggggtacggatcccctgccgccggggcagcctcagcggataccgctgccagggcagcccctgcagccccagccgatcctgactccggggcaaccccagaagatcccgactccgggacagcaccagccgatcctgactccggggcattcgcagccgatcccgactccggggcagcccctgccgccccagccgatcccgactccggggcggcccctgacgccccagccgatcccgactccggggcggcccctgacgccccagccgatccagatgccggggcggcccctgaggctcccgccgcccctgcggctgctgagacccgggcagcccatgtcgccccagctgcgccagacgcaggggctcccactgccccagccgcttctgccacccgggcagcccaagtccgccgggcggcctctgcagcccctgcctccggggccagacgcaagatccatctcagaccccccagccccgagatccaggctgccgatccgcctactccgcggcctactcgcgcgtctgcctggcggggcaagtccgagagcagccgcggccgccgcgtgtactacgatgaaggggtggccagcagcgacgatgactccagcggagacgagtccgacgatgggacctccggatgcctccgctggtttcagcatcggcgaaatcgccgccgccgaaagccccagcgcaacttactccgcaactttctcgtgcaagccttcgggggctgcttcggtcgatctgagagtccccagcccaaagcctcgcgctctctcaaggtcaagaaggtacccctggcggagaagcgcagacagatgcgcaaagaagccctggagaagcgggcccagaagcgcgcagagaagaaacgcagtaagctcatcgacaaacaactccaggacgaaaagatgggctacatgtgtacgcaccgcctgctgcttctaggtgctggagaatctggtaaaagcaccattgtgaagcagatgaggatcctgcatgttaatgggtttaatggagagggcggcgaagaggacccgcaggctgcaaggagcaacagcgatggtgagaaggcaaccaaagtgcaggacatcaaaaacaacctgaaagaggcgattgaaaccattgtggccgccatgagcaacctggtgccccccgtggagctggccaaccccgagaaccagttcagagtggactacatcctgagtgtgatgaacgtgcctgactttgacttccctcccgaattctatgagcatgccaaggctctgtgggaggatgaaggagtgcgtgcctgctacgaacgctccaacgagtaccagctgattgactgtgcccagtacttcctggacaagatcgacgtgatcaagcaggctgactatgtgccgagcgatcaggacctgcttcgctgccgtgtcctgacttctggaatctttgagaccaagttccaggtggacaaagtcaacttccacatgtttgacgtgggtggccagcgcgatgaacgccgcaagtggatccagtgcttcaacgatgtgactgccatcatcttcgtggtggccagcagcagctacaacatggtcatccgggaggacaaccagaccaaccgcctgcaggaggctctgaacctcttcaagagcatctggaacaacagatggctgcgcaccatctctgtgatcctgttcctcaacaagcaagatctgctcgctgagaaagtccttgctgggaaatcgaagattgaggactactttccagaatttgctcgctacactactcctgaggatgctactcccgagcccggagaggacccacgcgtgacccgggccaagtacttcattcgagatgagtttctgaggatcagcactgccagtggagatgggcgtcactactgctaccctcatttcacctgcgctgtggacactgagaacatccgccgtgtgttcaacgactgccgtgacatcattcagcgcatgcaccttcgtcagtacgagctgctctaagaagggaacccccaaatttaattaaagccttaagcacaattaattaaaagtgaaacgtaattgtacaagcagttaatcacccaccatagggcatgattaacaaagcaacctttcccttcccccgagtgattttgcgaaacccccttttcccttcagcttgcttagatgttccaaatttagaaagcttaaggcggcctacagaaaaaggaaaaaaggccacaaaagttccctctcactttcagtaaaaataaataaaacagcagcagcaaacaaataaaatgaaataaaagaaacaaatgaaataaatattgtgttgtgcagcattaaaaaaaatcaaaataaaaattaaatgtgagcaaag

SEQ ID NO: 5829 - protein, 909 aa, Homo sapiens
MQALRLRPALMEPGAFSGARPGLGGYSPPPEEAMPFEFDQPAQRGCSQLLLQVPDLAPGGPGAAGVPGAPPEEPQALRPAKAGSRGGYSPPPEETMPFELDGEGFGDDSPPPGLSRVIAQVDGSSQFAAVAASSAVRLTPAANAPPLWVPGAIGSPSQEAVRPPSNFTGSSPWMEISGPPFEIGSAPAGVDDTPVNMDSPPIALDGPPIKVSGAPDKRERAERPPVEEEAAEMEGAADAAEGGKVPSPGYGSPAAGAASADTAARAAPAAPADPDSGATPEDPDSGTAPADPDSGAFAADPDSGAAPAAPADPDSGAAPDAPADPDSGAAPDAPADPDAGAAPEAPAAPAAAETRAAHVAPAAPDAGAPTAPAASATRAAQVRRAASAAPASGARRKIHLRPPSPEIQAADPPTPRPTRASAWRGKSESSRGRRVYYDEGVASSDDDSSGDESDDGTSGCLRWFQHRRNRRRRKPQRNLLRNFLVQAFGGCFGRSESPQPKASRSLKVKKVPLAEKRRQMRKEALEKRAQKRAEKKRSKLIDKQLQDEKMGYMCTHRLLLLGAGESGKSTIVKQMRILHVNGFNGEGGEEDPQAARSNSDGEKATKVQDIKNNLKEAIETIVAAMSNLVPPVELANPENQFRVDYILSVMNVPDFDFPPEFYEHAKALWEDEGVRACYERSNEYQLIDCAQYFLDKIDVIKQADYVPSDQDLLRCRVLTSGIFETKFQVDKVNFHMFDVGGQRDERRKWIQCFNDVTAIIFVVASSSYNMVIREDNQTNRLQEALNLFKSIWNNRWLRTISVILFLNKQDLLAEKVLAGKSKIEDYFPEFARYTTPEDATPEPGEDPRVTRAKYFIRDEFLRISTASGDGRHYCYPHFTCAVDTENIRRVFNDCRDIIQRMHLRQYELL

SEQ ID NO: 5830 - DNA, 1593 bp, Homo sapiens
ccgccgccgccgcagcccggccgcgccccgccgccgccgccgccgccatgggctgcctcgggaacagtaagaccgaggaccagcgcaacgaggagaaggcgcagcgtgaggccaacaaaaagatcgagaagcagctgcagaaggacaagcaggtctaccgggccacgcaccgcctgctgctgctgggtgctggagaatctggtaaaagcaccattgtgaagcagatgaggatcctgcatgttaatgggtttaatggagagggcggcgaagaggacccgcaggctgcaaggagcaacagcgatggtgagaaggcaaccaaagtgcaggacatcaaaaacaacctgaaagaggcgattgaaaccattgtggccgccatgagcaacctggtgccccccgtggagctggccaaccccgagaaccagttcagagtggactacatcctgagtgtgatgaacgtgcctgactttgacttccctcccgaattctatgagcatgccaaggctctgtgggaggatgaaggagtgcgtgcctgctacgaacgctccaacgagtaccagctgattgactgtgcccagtacttcctggacaagatcgacgtgatcaagcaggctgactatgtgccgagcgatcaggacctgcttcgctgccgtgtcctgacttctggaatctttgagaccaagttccaggtggacaaagtcaacttccacatgtttgacgtgggtggccagcgcgatgaacgccgcaagtggatccagtgcttcaacgatgtgactgccatcatcttcgtggtggccagcagcagctacaacatggtcatccgggaggacaaccagaccaaccgcctgcaggaggctctgaacctcttcaagagcatctggaacaacagatggctgcgcaccatctctgtgatcctgttcctcaacaagcaagatctgctcgctgagaaagtccttgctgggaaatcgaagattgaggactactttccagaatttgctcgctacactactcctgaggatgctactcccgagcccggagaggacccacgcgtgacccgggccaagtacttcattcgagatgagtttctgaggatcagcactgccagtggagatgggcgtcactactgctaccctcatttcacctgcgctgtggacactgagaacatccgccgtgtgttcaacgactgccgtgacatcattcagcgcatgcaccttcgtcagtacgagctgctctaagaagggaacccccaaatttaattaaagccttaagcacaattaattaaaagtgaaacgtaattgtacaagcagttaatcacccaccatagggcatgattaacaaagcaacctttcccttcccccgagtgattttgcgaaacccccttttcccttcagcttgcttagatgttccaaatttagaaagcttaaggcggcctacagaaaaaggaaaaaaggccacaaaagttccctctcactttcagtaaaaataaataaaacagcagcagcaaacaaataaaatgaaataaaagaaacaaatgaaataaatattgtgttgtgcagcattaaaaaaaatcaaaataaaaattaaatgtgagcaaag

SEQ ID NO: 5831 - protein, 394 aa, Homo sapiens
MGCLGNSKTEDQRNEEKAQREANKKIEKQLQKDKQVYRATHRLLLLGAGESGKSTIVKQMRILHVNGFNGEGGEEDPQAARSNSDGEKATKVQDIKNNLKEAIETIVAAMSNLVPPVELANPENQFRVDYILSVMNVPDFDFPPEFYEHAKALWEDEGVRACYERSNEYQLIDCAQYFLDKIDVIKQADYVPSDQDLLRCRVLTSGIFETKFQVDKVNFHMFDVGGQRDERRKWIQCFNDVTAIIFVVASSSYNMVIREDNQTNRLQEALNLFKSIWNNRWLRTISVILFLNKQDLLAEKVLAGKSKIEDYFPEFARYTTPEDATPEPGEDPRVTRAKYFIRDEFLRISTASGDGRHYCYPHFTCAVDTENIRRVFNDCRDIIQRMHLRQYELL

SEQ ID NO: 5832 - DNA, 1551 bp, Homo sapiens
ccgccgccgccgcagcccggccgcgccccgccgccgccgccgccgccatgggctgcctcgggaacagtaagaccgaggaccagcgcaacgaggagaaggcgcagcgtgaggccaacaaaaagatcgagaagcagctgcagaaggacaagcaggtctaccgggccacgcaccgcctgctgctgctgggtgctggagaatctggtaaaagcaccattgtgaagcagatgaggatcctgcatgttaatgggtttaatggagacagtgagaaggcaaccaaagtgcaggacatcaaaaacaacctgaaagaggcgattgaaaccattgtggccgccatgagcaacctggtgccccccgtggagctggccaaccccgagaaccagttcagagtggactacatcctgagtgtgatgaacgtgcctgactttgacttccctcccgaattctatgagcatgccaaggctctgtgggaggatgaaggagtgcgtgcctgctacgaacgctccaacgagtaccagctgattgactgtgcccagtacttcctggacaagatcgacgtgatcaagcaggctgactatgtgccgagcgatcaggacctgcttcgctgccgtgtcctgacttctggaatctttgagaccaagttccaggtggacaaagtcaacttccacatgtttgacgtgggtggccagcgcgatgaacgccgcaagtggatccagtgcttcaacgatgtgactgccatcatcttcgtggtggccagcagcagctacaacatggtcatccgggaggacaaccagaccaaccgcctgcaggaggctctgaacctcttcaagagcatctggaacaacagatggctgcgcaccatctctgtgatcctgttcctcaacaagcaagatctgctcgctgagaaagtccttgctgggaaatcgaagattgaggactactttccagaatttgctcgctacactactcctgaggatgctactcccgagcccggagaggacccacgcgtgacccgggccaagtacttcattcgagatgagtttctgaggatcagcactgccagtggagatgggcgtcactactgctaccctcatttcacctgcgctgtggacactgagaacatccgccgtgtgttcaacgactgccgtgacatcattcagcgcatgcaccttcgtcagtacgagctgctctaagaagggaacccccaaatttaattaaagccttaagcacaattaattaaaagtgaaacgtaattgtacaagcagttaatcacccaccatagggcatgattaacaaagcaacctttcccttcccccgagtgattttgcgaaacccccttttcccttcagcttgcttagatgttccaaatttagaaagcttaaggcggcctacagaaaaaggaaaaaaggccacaaaagttccctctcactttcagtaaaaataaataaaacagcagcagcaaacaaataaaatgaaataaaagaaacaaatgaaataaatattgtgttgtgcagcattaaaaaaaatcaaaataaaaattaaatgtgagcaaag

SEQ ID NO: 5833 - protein, 380 aa, Homo sapiens
MGCLGNSKTEDQRNEEKAQREANKKIEKQLQKDKQVYRATHRLLLLGAGESGKSTIVKQMRILHVNGFNGDSEKATKVQDIKNNLKEAIETIVAAMSNLVPPVELANPENQFRVDYILSVMNVPDFDFPPEFYEHAKALWEDEGVRACYERSNEYQLIDCAQYFLDKIDVIKQADYVPSDQDLLRCRVLTSGIFETKFQVDKVNFHMFDVGGQRDERRKWIQCFNDVTAIIFVVASSSYNMVIREDNQTNRLQEALNLFKSIWNNRWLRTISVILFLNKQDLLAEKVLAGKSKIEDYFPEFARYTTPEDATPEPGEDPRVTRAKYFIRDEFLRISTASGDGRHYCYPHFTCAVDTENIRRVFNDCRDIIQRMHLRQYELL

SEQ ID NO: 5834 - DNA, 1494 bp, Homo sapiens
ggggtcggccgggtgctgggccgaggccgaggccggggcgggatccagagcgggagccggcgcgggatctgggactcggagcgggatccggagcgggacccaggagccggcgcggggccatggcgaggcgcgggccagggtggcggccgcttctgctgctcgtgctgctggcgggcgcggcgcagggcggcctctacttccgccggggacagacctgctaccggcctctgcggggggacgggctggctccgctggggcgcagcacatacccccggcctcatgagtacctgtccccagcggatctgcccaagagctgggactggcgcaatgtggatggtgtcaactatgccagcatcacccggaaccagcacatcccccaatactgcggctcctgctgggcccacgccagcaccagcgctatggcggatcggatcaacatcaagaggaagggagcgtggccctccaccctcctgtccgtgcagaacgtcatcgactgcggtaacgctggctcctgtgaagggggtaatgacctgtccgtgtgggactacgcccaccagcacggcatccctgacgagacctgcaacaactaccaggccaaggaccaggagtgtgacaagtttaaccaatgtgggacatgcaatgaattcaaagagtgccacgccatccggaactacaccctctggagggtgggagactacggctccctctctgggagggagaagatgatggcagaaatctatgcaaatggtcccatcagctgtggaataatggcaacagaaagactggctaactacaccggaggcatctatgccgaataccaggacaccacatatataaaccatgtcgtttctgtggctgggtggggcatcagtgatgggactgagtactggattgtccggaattcatggggtgaaccatggggcgagagaggctggctgaggatcgtgaccagcacctataaggatgggaagggcgccagatacaaccttgccatcgaggagcactgtacatttggggaccccatcgtttaaggccatgtcactagaagcgcagtttaagaaaaggcatggtgacccatgaccagaggggatcctatggttatgtgtgccaggctggctggcaggaactggggtggctatcaatattggatggcgaggacagcgtggcactggctgcgagtgttcctgagagttgaaagtgggatgacttatgacacttgcacagcatggctctgcctcacaatgatgcagtcagccacctggtgaagaagtgacctgcgacacaggaaacgatgggacctcagtcttcttcagcagaggacttgatattttgtatttggcaactgtgggcaataatatggcatttaagaggtgaaagagttcagacttatcaccattcttatgtcactttagaatcaagggtgggggagggagggagggagttggcagtttcaaatcgcccaagtgatgaataaagtatctggctctgcacgag

SEQ ID NO: 5835 - protein, 303 aa, Homo sapiens
MARRGPGWRPLLLLVLLAGAAQGGLYFRRGQTCYRPLRGDGLAPLGRSTYPRPHEYLSPADLPKSWDWRNVDGVNYASITRNQHIPQYCGSCWAHASTSAMADRINIKRKGAWPSTLLSVQNVIDCGNAGSCEGGNDLSVWDYAHQHGIPDETCNNYQAKDQECDKFNQCGTCNEFKECHAIRNYTLWRVGDYGSLSGREKMMAEIYANGPISCGIMATERLANYTGGIYAEYQDTTYINHVVSVAGWGISDGTEYWIVRNSWGEPWGERGWLRIVTSTYKDGKGARYNLAIEEHCTFGDPIV

SEQ ID NO: 5836 - DNA, 2223 bp, Homo sapiens
cgggtagcgcgctctgaaagtttatgaccgccgcagccaactcctggccggagctggagacgcagcgagcgatcggccggcctcgaacccccacagctggagggcgaggccagctgtacccggccccagtgccctttcgcggccacaagcggccgtcctcctggtccggtgctccggcgcctgatctaggttcatggagccggggctgtggctccttttcgggctcacagtgacctccgccgcaggattcgtgccttgctcccagtctggggatgctggcaggcgcggcgtgtcccaggcccccactgcagccagatctgagggggactgtgaagagactgtggctggccctggcgaggagactgtggctggccctggcgaggggactgtggccccgacagcactgcagggtccaagccctggaagccctgggcaggagcaggcggccgagggggcccctgagcaccaccgatccaggcgctgcacgtgcttcacctacaaggacaaggagtgtgtctactattgccacctggacatcatttggatcaacactcccgaacagacggtgccctatggactgtccaactacagaggaagcttccggggcaagaggtctgcggggccacttccagggaatctgcagctctcacatcggccacacttgcgctgcgcttgtgtggggagatatgacaaggcctgcctgcacttttgcacccaaactctggacgtcagcagtaattcaaggacggcagaaaaaacagacaaagaagaggaagggaaggttgaagtcaaggaccaacaaagcaagcaggctttagacctccaccatccaaagctcatgcccggcagtggactcgccctcgctccatctacctgcccccgctgcctctttcaggaaggagccccttaggaggacaggcctgcagctccaatttcatgcaggaaattggttttggagagttttggcaagttggaaagccacttactggcttttgacatgacttctcttggagaataagtggactccaagctaactctttgcaaatgtaaacacatgtccatcttgttaataaatgcaaaatgcccgtgcagcagaagcatgcgactttcatatccttgcctagaataggctgcatggtgtatgtcagtgagggccacgaggcgtcggctttagacacagatcatagctctacaggagtttatgaatttgaagcttatgggattttggcagagaaattttcagctgtgcttgatacccaccaaaagaatgtatctcgaaagaatgaaggaagaagaaaaaaggatccttgatgtttgtgacaagaaaatgagaaagttagtatctgcaatacagagcttgttcctgttcagtgactgaccctctgtattctgtatagacaccaggccgatacacagtggagttcccaggccttgtttgcaggaagccgactgtaaagacagccccagctcaaggctattaggttgaatatttgctttcatgagtaaatgtggatctttggggaatggcttcaaaataagtcacgaacacaaattctttgtaaattatgtaaattcctgtttatataaattggcaacaacttataccgtctgacagttcaaaatctctttcagctgcgctcttcccaccgagccgagcttactgtgagtgtggagatgttatcccaccatgtaaagtcgcctgcgcaggggagggctgcccatctccccaacccagtcacagagagataggaaacggcatttgagtgggtgtccagggccccgtagagagacatttaagatggtgtatgacagagcattggccttgaccaaatgttaaatcctctgtgtgtatttcataagttattacaggtataaaagtgatgacctatcatgaggaaatgaaagtggctgatttgctggtaggattttgtacagtttagagaagcgattatttattgtgaaactgttctccactccaactcctttatgtggatctgttcaaagtagtcactgtatatacgtatagagaggtagataggtaggtagattttaaattgcattctgaatacaaactcatactccttagagcttgaattacatttttaaaatgcatatgtgctgtttggcaccgtggcaagatggtatcagagagaaacccatcaattgctcaaatactcagaaagtactgtcaaaagcctaataaaaaacctaaagtttgctctg

SEQ ID NO: 5837 - protein, 238 aa, Homo sapiens
MEPGLWLLFGLTVTSAAGFVPCSQSGDAGRRGVSQAPTAARSEGDCEETVAGPGEETVAGPGEGTVAPTALQGPSPGSPGQEQAAEGAPEHHRSRRCTCFTYKDKECVYYCHLDIIWINTPEQTVPYGLSNYRGSFRGKRSAGPLPGNLQLSHRPHLRCACVGRYDKACLHFCTQTLDVSSNSRTAEKTDKEEEGKVEVKDQQSKQALDLHHPKLMPGSGLALAPSTCPRCLFQEGAP

SEQ ID NO: 5838 - DNA, 893 bp, Homo sapiens
ggcacgaggcggccgcccgccggcatgagctacgaccgcgccatcaccgtcttctcgcccgacggccacctcttccaagtggagtacgcgcaggaggccgtcaagaagggctcgaccgcggttggtgttcgaggaagagacattgttgttcttggtgtggagaagaagtcagtggccaaactgcaggatgaaagaacagtgcggaagatctgtgctttggatgacaacgtctgcatggcctttgcaggcctcaccgccgatgcaaggatagtcatcaacagggcccgggtggagtgccagagccaccggctgactgtagaggacccggtcactgtggagtacatcacccgctacatcgccagtctgaagcagcgttatacgcagagcaatgggcgcaggccgtttggcatctctgccctcatcgtgggtttcgactttgatggcactcctaggctctatcagactgacccctcgggcacataccatgcctggaaggccaatgccataggccggggtgccaagtcagtgcgcgagttcctggagaagaactatactgacgaagccattgaaacagatgatctgaccattaagctggtgatcaaggcactcctggaagtggttcagtcaggtggcaaaaacattgaacttgctgtcatgaggcgagatcaatccctcaagattttaaatcctgaagaaattgagaagtatgttgctgaaattgaaaaagaaaaagaagaaaacgaaaagaagaaacaaaagaaagcatcatgatgaataaaatgtctttgcttgtaatttttaaattcatatcaatcatggatgagtctcgatgtgtaggcctttccattccatttattcacactgagtgtcctacaataaacttccgtattttt

SEQ ID NO: 5839 - protein, 248 aa, Homo sapiens
MSYDRAITVFSPDGHLFQVEYAQEAVKKGSTAVGVRGRDIVVLGVEKKSVAKLQDERTVRKICALDDNVCMAFAGLTADARIVINRARVECQSHRLTVEDPVTVEYITRYIASLKQRYTQSNGRRPFGISALIVGFDFDGTPRLYQTDPSGTYHAWKANAIGRGAKSVREFLEKNYTDEAIETDDLTIKLVIKALLEVVQSGGKNIELAVMRRDQSLKILNPEEIEKYVAEIEKEKEENEKKKQKKAS

SEQ ID NO: 5840 - DNA, 4519 bp, Homo sapiens
gcagccggagtatccacctcgatgaccacgggctgagccccgcgccgccaccatgtccgtggccttcgcgtctgcccggccaagaggcaaaggggaggttacgcagcaaaccatccagaagatgctggacgagaaccaccacctgatccagtgcatcctggagtaccagagcaagggcaagacggccgagtgcacgcagtaccagcagatcctgcaccggaacctggtatacctggccacgatcgcagactccaaccagaacatgcagtccctgcttcctgccccgcccacgcagaacatgaacctgggccctggagccctgactcagagcggctccagccagggcctgcactctcagggcagcctgagtgacgccatcagcacgggcctgccaccctcctccctcctgcagggccagattggcaacgggccgagccacgtgtccatgcagcagacggcgcctaacacgctgcccaccacctccatgagcatctctgggcccggctacagccacgcgggacccgcctcgcagggcgtccccatgcaggggcaaggcaccatcggcaactacgtgtctcggaccaacatcaacatgcagtccaacccagtctccatgatgcagcagcaggcggccacgtcgcactacagctcggcgcagggcggcagccagcactaccagggccagtcgtccatcgccatgatggggcagggcagccaggggagcagcatgatggggcagcggcccatggcgccctaccggccctcccagcaaggctcttcccagcagtacctgggccaggaggagtactatggcgagcagtacagccacagccagggcgccgcggagcccatgggccagcagtactaccccgacggccatggcgattacgcctaccagcagtcatcctacacggagcagagctacgaccggtccttcgaggagtccacgcagcactactatgaggggggaaactcccagtacagccagcagcaggccgggtaccagcagggtgccgcgcagcagcagacgtactcccagcagcagtaccccagccagcagagctaccccgggcagcagcagggctacgggtctgcccagggagccccgtcacagtaccccggctaccagcaaggccaaggccagcagtacggaagctaccgagcaccgcagacagcgccgtctgcccagcagcagcggccctacggctatgaacagggccagtatggaaattaccagcagtaagggacacacattctggctggagcccttgtggtagcgtgttcatccaggggccggatgggctggcggcagctctggtgaattgtgacatgttggttacctgttcgcccagtgccacgtctgcatgtgaagcgtgctcatttcatgctgggtatgacgccgagcgcacaccactggcgtgagacagcgcttggtggtgtgatacttttggtgctgtgtatagtattgtatgtcggtacacggagaggtatcctttttttgtcccccgcccccttctcaatgtttctagctagctttgggggtcattttgtcatcagagcattctgtgcccagggacaggacagatctcgaggacaccacagtccacctgttcccgtcaacagacgttaggtctcattttcctcctcatgcagtgttgtagtgtgggttgtcaacttttctttaactggctacgccacagctggacacacatgcagcccctggagggcagcctcttcctgtgcctcgatggggtgggtgggagggcatcttctgtgcgttgggtcagtttctgttacgtaacgaaaaggataaacatctcccacgggagaggccacagatggccacttccagagcttgcccattgcctgtctctcgccaattccgtttatccaaaaaggtacatgtttttgtattaaaaagtaaacagggatcagtgactgtattccaaataaatatgaatccctaagggccgtggacaaattgcctaacccagggccagcggtattgctgaaggaaaggggcagctctctgggaagtgggccctcagagattactctggctttgacccttgtttagctgatggtcatttctgggattggaatatttaataagcccaattctaagttgataggtaattttaaatattcaaaccaaatcttcccaacagttggcaagttgtttattttatattatttcttccaggacctacttgctcagatctccaagcaagcatttcttttcttttagggatgtctgaaagtcacatccagttacattactgtgttctttctaatgaaaagtaaaggttttatatagagaaacttgagtaatttttacatttctaagacattaaatcccatttaaattctgtgtgaacattaaagacagcacacttgcaaaagtatggtcaaaggaaaaaaatcccacatttcaattaacaagtagcatggacatttgatcaacctttagttggaataataatattcatatttgctatgaatccttttaaaaaaatctttggataaatgctgacagatttccaagaactaccaagaaaatacaagagatatccaatgcttgatatatgaggcctagtaataacgatatttctctttaattgatgttttgttttaaaagttaaaagtaattcttggcgtggtggttcacgcctgtaatcccagcactttgggaggccgaagcgggcggatcacctgaggtcgggagttcgagaccagcctgaccaacatggagaaaccccgtccctactaaaaatacaaaattagccaggtatggtggtgcatacctgtaatcccagctactcgggaacctgaggcaggagaatggcttgaacccaggagacagaggttgtggtggggcaagatcgcaccattgcacccgagcctaggcaacaagagtgaaattccgtctcaaaaaaataaataaataaataaataaataagttaaaattaattctttatccagagtcgggtgctttagaatttataagtcacttatgtgttttgcttgaattaattctgacagcccctatgaggaaatctggaggcaggtaacagttcccattttagagatgaagaactgaggcacagattaaaggacttgcctgtgttgaataccagtcctgttctaggacattctcccctctcctaggagacggatgtcacgcacaaatggggagagaagtgtttattttgtaggcactaagggtttctaaaacccttaacactggtaagggctcaaaaataaacgtatgtgttcatattcgatcaccgaaatgagagttcttaattgctaattgacaaacgcgttagcaatttcagttagggagtcatctcccttgattgtgttcttttcctgtcaattttcatagacctaatttgcaaactcaatcggggactaaaatttcccactgaaaatgttaaacattttagataactgtgaagatagtttatttttattccttgccaatctgggaatatgccttttttgtgtgtttgtgtgtttttttaagtgctgtattaataatactttctgaaagaaaaggacacttaccccaaaacttcaatctgaaatgtcttacattaagaatatcttgaatgttgtgtatatattttaaaaagcactttgcaaaatagtttgtacatttatttcctaatttatacatgatttttggtgttaatatatttaatgattaataacagaatgtttatttaatgtgctgtccatttttatgtaatattatggggaaagtgatgccagcagttccttttcattattctatcttctgtcatatgaatgttgagcaaagcttaggccaacatgaattgtttgtgaagtgtggttgatggtgctttgtttttttctgactacttctatggaaggccagtgaagaagcaaaggaagacatgaaaattgacgctcattcttcttcctattgttccctgacatccagcaaattgtgaatttgaaaaatgatggccagttttcagaagtgctgacaaattcatattggtatgcaaaagctcatcacccattaaggtttgttgttgaatcaacagtactcagcatattaaaacagtacatcagaactcatgccaacagtctttatgatgggattaaggtggacaagatctcctaagatctgtgaatgggattaaggtggacaagatctcctaagatctgaaaagaaaccttaatacgctcatatggttggagtgttaagtgaacctctgattttgtcagggtttttctacgtgtaggcgtgaatagggggcaccccttcaaaactgtacaaagaagacgactgttttccatttccatttaaacatttttagccacttcatttctatttattgaacaggtcaaatttgtcttgttatttgtgagtacagtacatttaaaaaacatccttatcggttatttttttttcagtcggagtttgacgtataaattgtttatgcttttggtgtaatctcttaataaactggttcttcaaaaatc

SEQ ID NO: 5841 - protein, 396 aa, Homo sapiens
MSVAFASARPRGKGEVTQQTIQKMLDENHHLIQCILEYQSKGKTAECTQYQQILHRNLVYLATIADSNQNMQSLLPAPPTQNMNLGPGALTQSGSSQGLHSQGSLSDAISTGLPPSSLLQGQIGNGPSHVSMQQTAPNTLPTTSMSISGPGYSHAGPASQGVPMQGQGTIGNYVSRTNINMQSNPVSMMQQQAATSHYSSAQGGSQHYQGQSSIAMMGQGSQGSSMMGQRPMAPYRPSQQGSSQQYLGQEEYYGEQYSHSQGAAEPMGQQYYPDGHGDYAYQQSSYTEQSYDRSFEESTQHYYEGGNSQYSQQQAGYQQGAAQQQTYSQQQYPSQQSYPGQQQGYGSAQGAPSQYPGYQQGQGQQYGSYRAPQTAPSAQQQRPYGYEQGQYGNYQQ

SEQ ID NO: 5842 - DNA, 2902 bp, Homo sapiens
ggggccatggcacctgcaaggtgtttctcagcaagattgaggaccgtgtttcagggcgtggggcattgggctttgtccacatgggctggcctgaagcccagccggctactgccacagcgggcttctcccaggctgctctcggtcggccgtgcggacctcgccaagcatcaggaactcccggggaagaagctgctctctgagaaaaagctgaaaaggtactttgtggactatcggagagtgcttgtctgtggaggaaacggaggcgctggggcaagctgcttccacagtgagccccgcaaggagtttggaggccctgatggaggggacggaggcaacggtggacacgtcattctgagagttgaccagcaagtcaagtccctgtcgtcggtcctgtcgcggtaccagggtttcagtggagaagatggagggagtaaaaactgcttcgggcgcagtggcgccgtcctctacatccgggtccccgtgggcacgctggtgaaggagggaggcagagttgtggccgacctgtcttgcgtgggagatgagtacattgccgcgctgggcggggcaggagggaaaggcaaccgcttcttcctggccaacaacaaccgtgcccctgtgacctgtacccctggacagccaggacagcagcgagttctccacctggagctcaagacggtggcccacgccggaatggtgggattccccaacgccgggaagtcctcactgctccgggccatttcaaacgccagacccgccgtggcttcctacccgttcaccaccctgaagccccacgtcgggatcgtccactacgaaggccacctacaaatagcagtggccgacatccccggcatcatacgaggcgcccaccagaacaggggtctggggtccgccttcctcaggcacatcgagcgctgccgctttctcttgttcgtggtggatctttctcagcctgagccgtggactcaagttgacgatttaaaatatgaactggagatgtatgaaaagggcctgtctgcgaggccccacgcaatcgtcgcaaacaagattgacctccctgaagcccaagccaatctgtcccagctccgggatcacttgggacaggaggtcatcgtgctgtcggcgttgaccggcgagaacctggagcagctgctgttgcacctgaaggtgctgtatgacgcctacgcggaggccgagctgggccagggccgccagccgctcaggtggtagccacgccagagcggggtcgcctctgggcctctgtctgagcaaacctgggtgtgaattcggtggttttgaatgcataaagtgccttgtggacacgggggagttgtggtgcttctgggtctctgggccccgcctgctggcctgagatgccctcatgttgggaagcattccgtgccccctaccccgcctgccctccgtatttcctgcacctgtcagcctgcaccgactgatgagccagttgctcatttgtgctgattaacacccctaataaggggttggggtgcccataacggggtggccctgccgctgactcaggtctccgccatgcacgcgtggactctcggatgagctcagcagaaccgcacagccagagccccaggtcagaagtgcagaccagggttctcagcacagtgcccgtcgtgcttccatggcttgctacggagagagacctctggatccacactggggctgcgtctggcccgttgtccagcagccctgcggtaccgcaagcccaggcaccagtgtctcggggggcctcactgctgcgcaaggggtggggccgaggatgcaagtccaggcagagcggcgcaggcagctgtgagcttttctccatcagccgtctgagaagagcagtgaggccagctgcttcctgtccttcagaacacttctctgtgctcagtgggagccaggaagcctcaggcttcacgactgaatgcacccaatatccgacctggctgcgtgtttctggctgggctgccgtgtgcacagcaagttaactagaggggctgtgggccatggaactgtcagcgttattctcagaaggcggccgtggcatgggcagggtatagtgaggagtggaaggagacgtgtgcctggtaatatggggcggaatttccactcagctccatttgctggggatttaaagagaacccttgtgctacgccaggcagttaccgagccgaagggagatgatgggccttcgcccctcagtgggatggcagctgagggggccctgcatttgaccgtcgagactgcagcagcgcctttcctgtctgtggtttaagtctttgcagtcaagtactgatgcatccaagccaggcccatgcctggtgtctccctgactgcagaggagccccagggcaaggacagctcagctgctggcagcctgcctggcccatagacatcccccaagtagtctcaggcctctgacatgtccctgaggggcccctaagaaagaaagtggaggggacactccagaggctgtcgtgggaggatcatgtgagcctgggaggtcaaggctgcagtgagccgtgattgcaccactgcactccagcctgagtgacagagcgagaccctgtctcaaaaaacaaacaaacaaacaaacaaaaacagaacattctgggcacggtggctcatgcctgtagtcccagcactttgggaggccgaggctggtggatcacaaggtcaggagattgagaccatcctggctaacacagtgaaaccccgtctctactaaaaatacaaaaaaattagccaggcgtggtggcggtcacctgtagtcccagctactcgggaggctgaagcaggagaatggcgtgaacctgggaggcggagcttgcagtgagccgagatcacaccactgcactccagcctgagcgacagagcaagactccatctc

SEQ ID NO: 5843 - protein, 406 aa, Homo sapiens
MAPARCFSARLRTVFQGVGHWALSTWAGLKPSRLLPQRASPRLLSVGRADLAKHQELPGKKLLSEKKLKRYFVDYRRVLVCGGNGGAGASCFHSEPRKEFGGPDGGDGGNGGHVILRVDQQVKSLSSVLSRYQGFSGEDGGSKNCFGRSGAVLYIRVPVGTLVKEGGRVVADLSCVGDEYIAALGGAGGKGNRFFLANNNRAPVTCTPGQPGQQRVLHLELKTVAHAGMVGFPNAGKSSLLRAISNARPAVASYPFTTLKPHVGIVHYEGHLQIAVADIPGIIRGAHQNRGLGSAFLRHIERCRFLLFVVDLSQPEPWTQVDDLKYELEMYEKGLSARPHAIVANKIDLPEAQANLSQLRDHLGQEVIVLSALTGENLEQLLLHLKVLYDAYAEAELGQGRQPLRW

SEQ ID NO: 5844 - DNA, 1375 bp, Homo sapiens
gcgagcccggacggcgcctctcgaacgagtgtgggcgcgaggcaggatgacgacctcaggcgcgctctttccaagcctggtgccaggctctcggggcgcctccaacaagtacttggtggagtttcgggcgggaaagatgtccctgaaggggaccaccgtgactccggataagcggaaagggctggtgtacattcagcagacggacgactcgcttattcacttctgctggaaggacaggacgtccgggaacgtggaagacgacttgatcatcttccctgacgactgtgagttcaagcgggtgccgcagtgccccagcgggagggtctacgtgctgaagttcaaggcagggtccaagcggcttttcttctggatgcaggaacccaagacagaccaggatgaggagcattgccggaaagtcaacgagtatctgaacaaccccccgatgcctggggcactgggggccagcggaacgagcggccacgaactctctgcgctaggcggtgagggtggcctgcagagcctgctgggaaacatgagccacagccagctcatgcagctcatcggaccagccggcctcggaggactgggtgggctgggggccctgactggacctggcctggccagcttactggggagcagtgggcctccagggagcagctcctcctccagctcccggagccagtcggcagcggtcaccccgtcatccaccacctcttccacccgtgccaccccagccccttctgctccagcagctgcctcagcaactagcccgagccccgcgcccagttccgggaatggagccagcacagcagccagcccgacccagcccatccagctgagcgacctccagagcatcctggccacgatgaacgtaccagccgggccagcaggcggccagcaagtggacctggccagtgtgctgacgccggagataatggctcccatcctcgccaacgcggatgtccaggagcgcctgcttccctacttgccatctggggagtcgctgccgcagaccgcggatgagatccagaataccctgacctcgccccagttccagcaggccctgggcatgttcagcgcagccttggcctcggggcagctgggccccctcatgtgccagttcggtctgcctgcagaggctgtggaggccgccaacaagggcgatgtggaagcgtttgccaaagccatgcagaacaacgccaagcccgagcagaaagagggcgacacgaaggacaagaaggacgaagaggaggacatgagcctggactgagccacgcgccgtcctccgaggaactgggcgcttgcagtgcgttgcacaccctcacctcccacccactgattattaataaagtcttttcctttacctgcaaaaaaa

SEQ ID NO: 5845 - protein, 407 aa, Homo sapiens [sequence omitted]

SEQ ID NO: 5846 - DNA, 11344 bp, Homo sapiens
atggcgaagcggctctgcgcggggagcgcactgtgtgttcgcggcccccggggccccgcgccgctgctgctggtcgggctggcgctgctgggcgcggcgcgggcgcgggaggaggcgggcggcggcttcagcctgcacccgccctacttcaacctggccgagggcgcccgcatcgccgcctccgcgacctgcggagaggaggccccggcgcgcggctccccgcgccccaccgaggacctttactgcaagctggtagggggccccgtggccggcggcgaccccaaccagaccatccggggccagtactgtgacatctgcacggctgccaacagcaacaaggcacaccccgcgagcaatgccatcgatggcacggagcgctggtggcagagtccaccgctgtcccgcggcctggagtacaacgaggtcaacgtcaccctggacctgggccaggtcttccacgtggcctacgtcctcatcaagtttgccaactcaccccggccggacctctgggtgctggagcggtccatggacttcggccgcacctaccagccctggcagttctttgcctcctccaagagggactgtctggagcggttcgggccacagacgctggagcgcatcacacgggacgacgcggccatctgcaccaccgagtactcacgcatcgtgcccctggagaacggagagatcgtggtgtccctggtgaacggacgtccgggcgccatgaatttctcctactcgccgctgctacgtgagttcaccaaggccaccaacgtccgcctgcgcttcctgcgtaccaacacgctgctgggccatctcatggggaaggcgctgcgggaccccacggtcacccgccggtattattacagcatcaaggatatcagcatcggaggccgctgtgtctgccacggccacgcggatgcctgcgatgccaaagaccccacggacccgttcaggctgcagtgcacctgccagcacaacacctgcgggggcacctgcgaccgctgctgccccggcttcaatcagcagccgtggaagcctgcgactgccaacagtgccaacgagtgccagtcctgtaactgctacggccatgccaccgactgttactacgaccctgaggtggaccggcgccgcgccagccagagcctggatggcacctatcagggtgggggtgtctgtatcgactgccagcaccacaccaccggcgtcaactgtgagcgctgcctgcccggcttctaccgctctcccaaccaccctctcgactcgccccacgtctgccgccgctgcaactgcgagtccgacttcacggatggcacctgcgaggacctgacgggtcgatgctactgccggcccaacttctctggggagcggtgtgacgtgtgtgccgagggcttcacgggcttcccaagctgctacccgacgccctcgtcctccaatgacaccagggagcaggtgctgccagccggccagattgtgaattgtgactgcagcgcggcagggacccagggcaacgcctgccggaaggacccaagggtgggacgctgtctgtgcaaacccaacttccaaggcacccattgtgagctctgcgcgccagggttctacggccccggctgccagccctgccagtgttccagccctggagtggccgatgaccgctgtgaccctgacacaggccagtgcaggtgccgagtgggcttcgagggggccacatgtgatcgctgtgcccccggctactttcacttccctctctgccagttgtgtggctgcagccctgcaggaaccttgcccgagggctgcgatgaggccggccgctgcctatgccagcctgagtttgctggacctcattgtgaccggtgccgccctggctaccatggtttccccaactgccaagcatgcacctgcgaccctcggggagccctggaccagctctgtggggcgggaggtttgtgccgctgccgccccggctacacaggcactgcctgccaggaatgcagccccggctttcacggcttccccagctgtgtcccctgccactgctctgctgaaggctccctgcacgcagcctgtgacccccggagtgggcagtgcagctgccggccccgtgtgacggggctgcggtgtgacacatgtgtgcccggtgcctacaacttcccctactgcgaagctggctcttgccaccctgccggtctggccccagtggatcctgcccttcctgaggcacaggttccctgtatgtgccgggctcacgtggaggggccgagctgtgaccgctgcaaacctgggttctggggactgagccccagcaaccccgagggctgtacccgctgcagctgcgacctcaggggcacactgggtggagttgctgagtgccagccgggcaccggccagtgcttctgcaagccccacgtgtgcggccaggcctgcgcgtcctgcaaggatggcttctttggactggatcaggctgactattttggctgccgcagctgccggtgtgacattggcggtgcactgggccagagctgtgaaccgaggacgggcgtctgccggtgccgccccaacacccagggccccacctgcagcgagcctgcgagggaccactacctcccggacctgcaccacctgcgcctggagctggaggaggctgccacacctgagggtcacgccgtgcgctttggcttcaaccccctcgagttcgagaacttcagctggaggggctacgcgcagatggcacctgtccagcccaggatcgtggccaggctgaacctgacctcccctgaccttttctggctcgtcttccgatacgtcaaccggggggccatgagtgtgagcgggcgggtctctgtgcgagaggagggcaggtcggccacctgcgccaactgcacagcacagagtcagcccgtggccttcccacccagcacggagcctgccttcatcaccgtgccccagaggggcttcggagagccctttgtgctgaaccctggcacctgggccctgcgtgtggaggccgaaggggtgctcctggactacgtggttctgctgcctagcgcatactacgaggcggcgctcctgcagctgcgggtgactgaggcctgcacataccgtccctctgcccagcagtctggcgacaactgcctcctctacacacacctccccctggatggcttcccctcggccgccgggctggaggccctgtgtcgccaggacaacagcctgccccggccctgccccacggagcagctcagcccgtcgcacccgccactgatcacctgcacgggcagtgatgtggacgtccagcttcaagtggcagtgccacagccaggccgctatgccctagtggtggagtacgccaatgaggatgcccgccaggaggtgggcgtggccgtgcacaccccacagcgggccccccagcaggggctgctctccctgcacccctgcctgtacagcaccctgtgccggggcactgcccgggatacccaggaccacctggctgtcttccacctggactcggaggccagcgtgaggctcacagccgaacaggcacgcttcttcctgcacggggtcactctggtgcccattgaggagttcagcccggagttcgtggagccccgggtcagctgcatcagcagccacggcgcctttggccccaacagtgccgcctgtctgccctcgcgcttcccaaagccgccccagcccatcatcctcagggactgccaggtgatcccgctgccgcccggcctcccgctgacccacgcgcaggatctcactccagccatgtccccagctggaccccgacctcggccccccaccgctgtggaccctgatgcagagcccaccctgctgcgtgagccccaggccaccgtggtcttcaccacccatgtgcccacgctgggccgctatgccttcctgctgcacggctaccagccagcccaccccaccttccccgtggaagtcctcatcaacgccggccgcgtgtggcagggccacgccaacgccagcttctgtccacatggctacggctgccgcaccctggtggtgtgtgagggccaggccctgctggacgtgacccacagcgagctcactgtgaccgtgcgtgtgcccaagggccggtggctctggctggattatgtactcgtggtccctgagaacgtctacagctttggctacctccgggaggagcccctggataaatcctatgacttcatcagccactgcgcagcccagggctaccacatcagccccagcagctcatccctgttctgccgaaacgctgctgcttccctctccctcttctataacaacggagcccgtccatgtggctgccacgaagtaggtgctacaggccccacgtgtgagcccttcgggggccagtgtccctgccatgcccatgtcattggccgtgactgctcccgctgtgccaccggatactggggcttccccaactgcaggccctgtgactgcggtgcccgcctctgtgacgagctcacgggccagtgcatctgcccgccacgcaccatcccgcccgactgcctgctgtgccagccccagacctttggctgccaccccctggtcggctgtgaggagtgtaactgctcagggcccggcatccaggagctcacagaccctacctgtgacacagacagcggccagtgcaagtgcagacccaacgtgactgggcgccgctgtgatacctgctctccgggcttccatggctacccccgctgccgcccctgtgactgtcacgaggcgggcactgcgcctggcgtgtgtgaccccctcacagggcagtgctactgtaaggagaacgtgcagggccccaaatgtgaccagtgcagccttgggaccttctcactggatgctgccaaccccaaaggttgcacccgctgcttctgctttggggccacggagcgctgccggagctcgtcctacacccgccaggagttcgtggatatggagggatgggtgctgctgagcactgaccggcaggtggtgccccacgagcggcagccagggacggagatgctccgtgcagacctgcggcacgtgcctgaggctgtgcccgaggctttccccgagctgtactggcaggccccaccctcctacctgggggaccgggtgtcatcctacggtgggaccctccgttatgaactgcactcagagacccagcggggagatgtctttgtccccatggagagcaggccggatgtggtgctgcagggcaaccagatgagcatcacattcctggagccggcataccccacgcctggccacgttcaccgtgggcagctgcagctggtggaggggaacttccggcatacggagacgcgcaacactgtgtcccgcgaggagctcatgatggtgctggccagcctggagcagctgcagatccgtgccctcttctcacagatctcctcggctgtcttcctgcgcagggtggcactggaggtggccagcccagcaggccagggggccctggccagcaatgtggagctgtgcctgtgccccgccagctaccggggggactcatgccaggaatgtgcccccggcttctatcgggacgtcaaaggtctcttcctgggccgatgtgtcccttgtcagtgccatggacactcagaccgctgcctccctggctctggcgtctgtgtggactgccagcacaacaccgaaggggcccactgtgagcgctgccaggctggcttcgtgagcagcagggacgaccccagcgccccctgtgtcagctgcccctgccccctctcagtgccttccaacaacttcgccgagggctgtgtcctgcgaggcggccgcacccagtgcctctgcaaacctggttatgcaggtgcctcctgcgagcggtgtgcgcccggattctttgggaacccactggtgctgggcagctcctgccagccatgcgactgcagcggcaacggtgaccccaacttgctcttcagcgactgcgaccccctgacgggcgcctgccgtggctgcctgcgccacaccactgggccccgctgcgagatctgtgcccccggcttctacggcaacgccctgctgcccggcaactgcacccggtgcgactgtaccccatgtgggacagaggcctgcgacccccacagcgggcactgcctgtgcaaggcgggcgtgactgggcggcgctgtgaccgctgccaggagggacattttggtttcgatggctgcgggggctgccgcccgtgtgcttgtggaccggccgccgagggctccgagtgccacccccagagcggacagtgccactgccgaccagggaccatgggaccccagtgccgcgagtgtgcccctggctactgggggctccctgagcagggctgcaggcgctgccagtgccctgggggccgctgtgaccctcacacgggccgctgcaactgccccccggggctcagcggggagcgctgcgacacctgcagccagcagcatcaggtgcctgttccaggcgggcctgtgggccacagcatccactgtgaaggttgtgtgaccactgtgtggtcctgctcctggatgacctggaacgggccggcgccctcctccccgccattcacgagcaactgcgtggcatcaatgccagctccatggcctgggcccgtctgcacaggctgaacgcctccatcgctgacctgcagagccagctccggagccccctgggcccccgccatgagacggcacagcagctggaggtgctggagcagcagagcacaagcctcgggcaggacgcacggcggctaggcggccaggccgtggggacccgagaccaggcgagccaattgctggccggcaccgaggccacactgggccatgcgaagacgctgttggcggccatccgggctgtggaccgcaccctgagcgagctcatgtcccagacgggccacctggggctggccaatgcctcggctccatcaggtgagcagctgctccggacactggccgaggtggagcggctgctctgggagatgcgggcccgggacctgggggccccgcaggcagcagctgaggctgagttggctgcagcacagagattgctggcccgggtgcaggagcagctgagcagcctctgggaggagaaccaggcactggccacacaaacccgcgaccggctggcccagcacgaggccggcctcatggacctgcgagaggctttgaaccgggcagtggacgccacacgggaggcccaggagctcaacagccgcaaccaggagcgcctggaggaagccctgcaaaggaagcaggagctgtcccgggacaatgccaccctgcaggccactctgcatgcggctagggacaccctggccagcgtcttcagattgctgcacagcctggaccaggctaaggaggagctggagcgcctcgccgccagcctggatggggctcggaccccactgctgcagaggatgcagaccttctccccggcgggcagcaagctgcgtctagtggaggccgccgaggcccacgcacagcagctgggccagctggcactcaatctgtccagcatcatcctggacgtcaaccaggaccgcctcacccagagggccatcgaggcctccaacgcctacagccgcatcctgcaggccgtgcaggctgccgaggatgctgctggccaggccctgcagcaggcggaccacacgtgggcgacggtggtgcggcagggcctggtggaccgagcccagcagctcctggccaacagcactgcactagaagaggccatgctccaggaacagcagaggctgggccttgtgtgggctgccctccagggtgccaggacccagctccgagatgtccgggccaagaaggaccagctggaggcgcacatccaggcggcgcaggccatgcttgccatggacacagacgagacaagcaagaagatcgcacatgccaaggctgtggctgctgaagcccaggacaccgccacccgtgtgcagtcccagctgcaggccatgcaggagaatgtggagcggtggcagggccagtacgagggcctgcggggccaggacctgggccaggcagtgcttgacgcaggccactcagtgtccaccctggagaagacgctgccccagctgctggccaagctgagcatcctggagaaccgtggggtgcacaacgccagcctggccctgtccgccagcattggccgcgtgcgagagctcattgcccaggcccggggggctgccagtaaggtcaaggtgcccatgaagttcaacgggcgctcaggggtgcagctgcgcaccccacgggatcttgccgaccttgctgcctacactgccctcaagttctacctgcagggcccagagcctgagcctgggcagggtaccgaggatcgctttgtgatgtacatgggcagccgccaggccactggggactacatgggtgtgtctctgcgtgacaagaaggtgcactgggtgtatcagctgggtgaggcgggccctgcagtcctaagcatcgatgaggacattggggagcagttcgcagctgtcagcctggacaggactctccagtttggccacatgtccgtcacagtggagagacagatgatccaggaaaccaagggtgacacggtggcccctggggcagaggggctgctcaacctgcggccagacgacttcgtcttctacgtcggggggtaccccagtaccttcacgccccctcccctgcttcgcttccccggctaccggggctgcatcgagatggacacgctgaatgaggaggtggtcagcctctacaacttcgagaggaccttccagctggacacggctgtggacaggccttgtgcccgctccaagtcgaccggggacccgtggctcacggacggctcctacctggacggcaccggcttcgcccgcatcagcttcgacagtcagatcagcaccaccaagcgcttcgagcaggagctgcggctcgtgtcctacagcggggtgctcttcttcctgaagcagcagagccagttcctgtgcttggccgtgcaagaaggcagcctcgtgctgttgtatgactttggggctggcctgaaaaaggccgtcccactgcagcccccaccgcccctgacctcggccagcaaggcgatccaggtgttcctgctggggggcagccgcaagcgtgtgctggtgcgtgtggagcgggccacggtgtacagcgtggagcaggacaatgatctggagctggccgacgcctactacctggggggcgtgccgcccgaccagctgcccccgagcctgcgacggctcttccccaccggaggctcagtccgtggctgcgtcaaaggcatcaaggccctgggcaagtatgtggacctcaagcggctgaacacgacaggcgtgagcgccggctgcaccgccgacctgctggtggggcgcgccatgactttccatggccacggcttccttcgcctggcgctctcgaacgtggcaccgctcactggcaacgtctactccggcttcggcttccacagcgcccaggacagtgccctgctctactaccgggcgtccccggatgggctatgccaggtgtccctgcagcagggccgtgtgagcctacagctcctgaggactgaagtgaaaactcaagcgggcttcgccgatggtgccccccattacgtcgccttctacagcaatgccacgggagtctggctgtatgtcgatgaccagctccagcagatgaagccccaccggggaccaccccccgagctccagccgcagcctgaggggcccccgaggctcctcctgggaggcctgcctgagtctggcaccatttacaacttcagtggctgcatcagcaacgtcttcgtgcagcggctcctgggcccacagcgcgtatttgatctgcagcagaacctgggcagcgtcaatgtgagcacgggctgtgcacccgccctgcaagcccagaccccgggcctggggcctagaggactgcaggcctcccgccgcagccgtcagcccgcccggcatcctgcctgcatgctgcccccacacctcaggaccacccgagactcctaccagtttgggggttccctgtccagtcacctggagtttgtgggcatcctggcccgacataggaactggcccagtctctccatgcacgtcctcccgcgaagctcccgaggcctcctcctcttcactgcccgtctgaggcccggcagcccctccctggcgctcttcctgagcaatggccacttcgttgcacagatggaaggcctcgggactcggctccgcgcccagagccgccagcgctcccggcctggccgctggcacaaggtctccgtgcgctgggagaagaaccggatcctgctggtgacggacggggcccgggcctggagccaggaggggccgcaccggcagcaccagggggcagagcacccccagccccacaccctctttgtgggcggcctcccggccagcagccacagctccaaacttccggtgaccgtcgggttcagcggctgtgtgaagagactgaggctgcacgggaggcccctgggggcccccacacggatggcaggggtcacaccctgcatcttgggccccctggaggcgggcctgttcttcccaggcagcgggggagttatcactttagacctcccaggagctacactgcctgatgtgggcctggaactggaggtgcggcccctggcagtcaccggactgatcttccacttgggccaggcccggacgcccccctacttgcagttgcaggtgaccgagaagcaagtcctgctgcgggcggatgacggagcaggggagttctccacgtcagtgacccgcccctcagtgctgtgtgatggccagtggcaccggctagcggtgatgaaaagcgggaatgtgctccggctggaggtggacgcgcagagcaaccacaccgtgggccccttgctggcggctgcagctggtgccccagcccctctgtacctcgggggcctgcctgagcccatggccgtgcagccctggccccccgcctactgcggctgcatgaggaggctggcggtgaaccggtcccccgtcgccatgactcgctctgtggaggtccacggggcagtgggggccagtggctgcccagccgcctaggacacagccaaccccggcccctggtcaggcccctgcagctgcctcacaccgccccttgtgctcgcctcataggtgtctatttggactctaagctctacgggtgacagatcttgtttctgaagatggtttaagttatagcttcttaaacgaaagaataaaatactgcaaaatgtttttatatttggcccttccacccatttttaattgtgagagatttgtcaccaatcatcactggttcctccttaaaaattaaaaagtaacttctgtgt

SEQ ID NO: 5847 - DNA, 356 bp, Homo sapiens
ctttctctctcgcgcgcggtgtggtggcagcaggcgcagcccagcctcgaaatgcagaacgacgccggcgagttcgtggacctgtacgtgccgcggaaatgctccgctagcaatcgcatcatcggtgccaaggaccacgcatccatccagatgaacgtggccgaggttgacaaggtcacaggcaggtttaatggccagtttaaaacttatgctatctgcggggccattcgtaggatgggtgagtcagatgattccattctccgattggccaaggccgatggcatcgtctcaaagaacttttgactggagagaatcacagatgtggaatatttgtcataaataaataatgaaaacct

SEQ ID NO: 5848 - protein, 83 aa, Homo sapiens
MQNDAGEFVDLYVPRKCSASNRIIGAKDHASIQMNVAEVDKVTGRFNGQFKTYAICGAIRRMGESDDSILRLAKADGIVSKNF

SEQ ID NO: 5849 - DNA, 1635 bp, Homo sapiens
agtgcgcctgcgcggagctcgtggccgcgcctgctcccgccgggggctccttgctcggccgggccgcggccatgggagaggccgaggtgggcggcgggggcgccgcaggcgacaagggcccgggggaggcggccaccagcccggcggaggagacagtggtgtggagccccgaggtggaggtgtgcctcttccacgccatgctgggccacaagcccgtcggtgtgaaccgacacttccacatgatttgtattcgggacaagttcagccagaacatcgggcggcaggtcccatccaaggtcatctgggaccatctgagcaccatgtacgacatgcaggcgctgcatgagtctgagattcttccattcccgaatccagagaggaacttcgtccttccagaagagatcattcaggaggtccgagaaggaaaagtgatgatagaagaggagatgaaagaggagatgaaggaagacgtggacccccacaatggggctgacgatgttttttcatcttcagggagtttggggaaagcatcagaaaaatccagcaaagacaaagagaagaactcctcagacttggggtgcaaagaaggcgcagacaagcggaagcgcagccgggtcaccgacaaagtcctgaccgcaaacagcaacccttccagtcccagtgctgccaagcggcgccgcacgtagaccctcagccctggtggcggcagagaagcgggcgaggcactgtggtcgctgagggggttggctgggtctgagtgccaccccccaggccacagtgataccatcccagtgccatgagcccacactgcccgccctcaggctctcaggtgaacgtggccgtcagcggggaaacgtgtgtgtcagttggaccatgtgggaccccgatggacctgaaagaccaggatcggtccagctcagatattgagggctctgaagcctagttctgtcttctctggagcagctgtggcttccccgtggctgcttggtgacatggattagcgctacgtgggctgcagcatttgggatccaggctacctagaggggcatcgggccagggaaaacctcggattagcaagcaataaaaatatgacctcactcttcctcaaaggagcccctggtcttccctgtgtgactcagttctttccatctgtttgtcccgctgcaagcctctttctgcgctgactgtgacatcggaacgtggccttcctgtcaccccctccgtgccacgcactgaaggccacccccacccacctgggaaactaagaactggatattttgcctcattcacttgtactgtaacaatgtatataatttggttggtatttcactatttaatttttaagaagcctattttactagtgttttatatgaacaaagtactgcagaagttaaacctgtgttgtattttttctgagatgttttgctttaagagatactttttgctcagtttttatatgccagatacagagaatttgtagcggttattttttgtatgatctagtaacttgcaaacagaccaaatggatgagaggcggggaccgtgcagctgtcggctgatgaggaggcggccgccccagtgctgatggagatgccactttcgtgtgactgcgaacattaaagcacaaaaaaatcc

SEQ ID NO: 5850 - protein, 204 aa, Homo sapiens
MGEAEVGGGGAAGDKGPGEAATSPAEETVVWSPEVEVCLFHAMLGHKPVGVNRHFHMICIRDKFSQNIGRQVPSKVIWDHLSTMYDMQALHESEILPFPNPERNFVLPEEIIQEVREGKVMIEEEMKEEMKEDVDPHNGADDVFSSSGSLGKASEKSSKDKEKNSSDLGCKEGADKRKRSRVTDKVLTANSNPSSPSAAKRRRT

SEQ ID NO: 5851 - DNA, 2400 bp, Homo sapiens
cccgccgccgccgagcatggacgaccccgactgcgactccacctgggaggaggacgaggaggatgcggaggacgcggaggacgaggactgcgaggacggcgaggccgccggcgcgagggacgcggacgcaggggacgaggacgaggagtcggaggagccgcgggcggcgcggcccagctcgttccagtccagaatgacagggtccagaaactggcgagccacgagggacatgtgtaggtatcggcacaactatccggatctggtggaacgagactgcaatggggacacgccaaacctgagtttctacagaaatgagatccgcttcctgcccaacggctgtttcattgaggacattcttcagaactggacggacaactatgacctccttgaggacaatcactcctacatccagtggctgtttcctctgcgagaaccaggagtgaactggcatgccaagcccctcacgctcagggaggtcgaggtgtttaaaagctcccaggagatccaggagcggcttgtccgggcctacgagctcatgctgggcttctacgggatccggctggaggaccgaggcacgggcacggtgggccgagcacagaactaccagaagcgcttccagaacctgaactggcgcagccacaacaacctccgcatcacacgcatcctcaagtcgctgggtgagctgggcctcgagcacttccaggcgccgctggtccgcttcttcctggaggagacgctggtgcggcgggagctgccgggggtgcggcagagtgccctggactacttcatgttcgccgtgcgctgccgacaccagcgccgccagctggtgcacttcgcctgggagcacttccggccccgctgcaagttcgtctgggggccccaagacaagctgcggaggttcaagcccagctctctgccccatccgctcgagggctccaggaaggtggaggaggaaggaagccccggggaccccgaccacgaggccagcacccagggtcggacctgtgggccagagcatagcaagggtgggggcagggtggacgaggggccccagccacggagcgtggagccccaggatgcgggacccctggagaggagccagggggatgaggcagggggccacggggaagataggccggagcccttaagccccaaagagagcaagaagaggaagctggagctgagccggcgggagcagccgcccacagagccaggccctcagagtgcctcagaggtggagaagatcgctctgaatttggaggggtgtgccctcagccagggcagcctcaggacggggacccaggaagtgggcggtcaggaccctggggaggcagtgcagccctgccgccaacccctgggagccagggtggccgacaaggtgaggaagcggaggaaggtggatgagggtgctggggacagtgctgcggtggccagtggtggtgcccagaccttggcccttgccgggtcccctgccccatcggggcaccccaaggctggacacagtgagaacggggttgaggaggacacagaaggtcgaacggggcccaaagaaggtacccctgggagcccatcggagaccccaggccccagcccagcaggacctgcaggggacgagccagccgagagcccatcggagaccccaggcccccgcccagcaggacctgcaggggacgagccagccgagagcccatcggagaccccaggcccccgcccggcaggacctgcaggggacgagccagccgagagcccatcggagaccccaggccccagcccggcaggacctacaagggatgagccagccgagagcccatcggagaccccaggcccccgcccggcaggacctgcaggggacgagccagccgagagcccatcggagaccccaggcccccgcccggcaggacctgcaggggacgagccagccgagagcccatcggagaccccaggccccagcccggcaggacctacaagggatgagccagccaaggcgggggaggcagcagagttgcaggacgcagaggtggagtcttctgccaagtctgggaagccttaaggaaaggagtgcccgtcggcgtcttggtcctcctgtccctgctgcaggggctggggcctccggagctgctgcgggctcccctcaggctctgcttcgtgacccgtgacccatgacccacagtgctggcctcctgtggggccactatagcagccaccagaagccgcgaggccctcagggaagcccaaggcctgcagaagcctcctggcctggctgtgtcttccccacccagctctcccctgcgcccctgtctttgtaaattgacccttctggagtggggggcggcgggcagggctgcttttcttagtctgataccaagcaaggccttttctgaataaattcatttgactttg

SEQ ID NO: 5852 - protein, 677 aa, Homo sapiens
MDDPDCDSTWEEDEEDAEDAEDEDCEDGEAAGARDADAGDEDEESEEPRAARPSSFQSRMTGSRNWRATRDMCRYRHNYPDLVERDCNGDTPNLSFYRNEIRFLPNGCFIEDILQNWTDNYDLLEDNHSYIQWLFPLREPGVNWHAKPLTLREVEVFKSSQEIQERLVRAYELMLGFYGIRLEDRGTGTVGRAQNYQKRFQNLNWRSHNNLRITRILKSLGELGLEHFQAPLVRFFLEETLVRRELPGVRQSALDYFMFAVRCRHQRRQLVHFAWEHFRPRCKFVWGPQDKLRRFKPSSLPHPLEGSRKVEEEGSPGDPDHEASTQGRTCGPEHSKGGGRVDEGPQPRSVEPQDAGPLERSQGDEAGGHGEDRPEPLSPKESKKRKLELSRREQPPTEPGPQSASEVEKIALNLEGCALSQGSLRTGTQEVGGQDPGEAVQPCRQPLGARVADKVRKRRKVDEGAGDSAAVASGGAQTLALAGSPAPSGHPKAGHSENGVEEDTEGRTGPKEGTPGSPSETPGPSPAGPAGDEPAESPSETPGPRPAGPAGDEPAESPSETPGPRPAGPAGDEPAESPSETPGPSPAGPTRDEPAESPSETPGPRPAGPAGDEPAESPSETPGPRPAGPAGDEPAESPSETPGPSPAGPTRDEPAKAGEAAELQDAEVESSAKSGKP

SEQ ID NO: 5853 - DNA, 2511 bp, Homo sapiens
ccgacgccgcagctcagactccgctcagccatggccgggccgcgcgcgtgcgccccgctcctgctcctgctcctgctcggggagcttctggcggccgccggggcgcagagagtgggactccccggcccccccggccccccagggccgcccggcaagcccggccaggacggcattgacggagaagctggtcctccaggtctgcctgggcccccgggaccaaagggggccccaggaaagccggggaaaccaggagaggctgggctgccgggactgccgggtgtggatggtctgactggacgagatggaccccctggacccaagggtgcccctggggaacggggaagtctgggacccccggggccgcccgggctggggggcaaaggcctccctggaccccccggagaggcaggagtgagcggccccccaggtgggatcggcctccgcggccccccgggacctcctggactccccggcctccctggtcccccaggacctcccggaccccctggacacccaggagttctccctgaaggcgctactgaccttcagtgcccaagtatctgcccgccaggtcccccagggccccctggaatgccagggttcaagggacccactggctacaaaggcgagcagggggaagtcggcaaggacggcgagaagggtgaccctggcccccctgggcccgccggcctcccgggcagcgtggggctgcagggcccccggggattacgaggactgccagggccactcgggccccctggggaccggggtcccattgggttccgagggccgcctgggatcccaggagcgcctgggaaagcgggtgaccgaggcgagaggggcccagaagggttccgcggccccaagggtgacctcggcagacctggtcccaagggaacccccggagtggccgggccaagcggagagccgggcatgccgggcaaggacggccagaatggcgtgccaggactcgatggccagaagggagaggctggtcgcaacggtgctccgggagagaagggccccaacgggctgccgggcctccctggacgagcggggtccaaaggcgagaagggagaacggggcagagctggggagctgggtgaggccggcccctctggagagccaggcgtccctggagatgctggcatgcctggggagcgcggtgaggctggccaccggggctcagcgggggccctcggcccacaaggccctcccggagcccctggtgtccgaggcttccagggccagaagggcagcatgggagaccccggccttccaggcccccagggcctccgaggtgacgtgggcgaccggggtccgggaggtgccgcaggccctaagggagaccagggtattgcaggttccgacggtcttcctggggataaaggagaactgggtcccagcggcctggtcggacccaaaggagagtctggcagtcgaggggagctgggccccaaaggcacccagggtcccaacggcaccagcggtgttcagggtgtccccgggccccccggtcctctgggcctgcagggcgtcccgggtgttcctggcatcacggggaagccgggagttccggggaaggaggccagcgagcagcgcatcagggagctgtgtggggggatgatcagcgaacaaattgcacagttagccgcgcacctaaggaagcctttggcacccgggtccattggtcggcccggtccagctggcccccctgggcccccaggacccccaggctccattggtcaccctggcgctcgaggaccccctggataccgcggtcccactggggagctgggagaccccgggcccagaggaaaccagggtgacagaggagacaaaggcgcggcaggagcagggctggacgggcctgaaggagaccaggggccccaaggaccccaaggcgtgcccggcaccagcaaggacggccaggacggtgctcccggcgagcctgggcctcccggagatcctgggcttccaggtgccattggggcccaggggacaccggggatctgcgacacctcagcctgccaaggagccgtgttaggaggggtcggggagaaatcaggctctcgaagctcataaaattcaacgtgaggaagcaagtgacaaggacgcccgaagcacagtggacggtcatgaaggagcgggggtgtggcaggcgggtgacgtccaggagagggagcgcccctggctgcccctcggccgccgactggacgcgcgggccttgccagcgagcaccctcatcgggctgtcgcctgacagcatacctcaaaaggccctagctaataaacctgtaagcccagcatttgagagaaggtagggtgtgtatatataaaaggttgtgtacaactccacgaggtgaaaaatattcagtaacttgtttacatagcatttgtgtaaagactatgatctcatcccaataaaatgatatattaaaccttcagattaatgactggctacagagtaacaaaaaataaagaatttaatgtacagtaaattctctcccat

SEQ ID NO: 5854 - protein, 684 aa, Homo sapiens
MAGPRACAPLLLLLLLGELLAAAGAQRVGLPGPPGPPGPPGKPGQDGIDGEAGPPGLPGPPGPKGAPGKPGKPGEAGLPGLPGVDGLTGRDGPPGPKGAPGERGSLGPPGPPGLGGKGLPGPPGEAGVSGPPGGIGLRGPPGPPGLPGLPGPPGPPGPPGHPGVLPEGATDLQCPSICPPGPPGPPGMPGFKGPTGYKGEQGEVGKDGEKGDPGPPGPAGLPGSVGLQGPRGLRGLPGPLGPPGDRGPIGFRGPPGIPGAPGKAGDRGERGPEGFRGPKGDLGRPGPKGTPGVAGPSGEPGMPGKDGQNGVPGLDGQKGEAGRNGAPGEKGPNGLPGLPGRAGSKGEKGERGRAGELGEAGPSGEPGVPGDAGMPGERGEAGHRGSAGALGPQGPPGAPGVRGFQGQKGSMGDPGLPGPQGLRGDVGDRGPGGAAGPKGDQGIAGSDGLPGDKGELGPSGLVGPKGESGSRGELGPKGTQGPNGTSGVQGVPGPPGPLGLQGVPGVPGITGKPGVPGKEASEQRIRELCGGMISEQIAQLAAHLRKPLAPGSIGRPGPAGPPGPPGPPGSIGHPGARGPPGYRGPTGELGDPGPRGNQGDRGDKGAAGAGLDGPEGDQGPQGPQGVPGTSKDGQDGAPGEPGPPGDPGLPGAIGAQGTPGICDTSACQGAVLGGVGEKSGSRSS

SEQ ID NO: 5855 - DNA, 2759 bp, Homo sapiens
tctagccccgcgccatctcggtggccgtccgcccactccgcggcgttcggggaaatggctgcgagaccctagaggcctgcggcctgcggagcttactccacgggaacagcctctagataatctgagttgttgaaaatacgaagcctgttactcgtgaacagtggctgacaacagtgttgttgtgagcctggctgtctgcttggacccagaggtttcgtctgccagggtttttggttgtatttaggatttcagggaaaagtgtccaagctttcagtgttggagcaggtatggacgacaaaggcgacccgagcaatgaggaggcacctaaggccatcaaacccaccagcaaagagttcaggaaaacatggggttttcgaaggaccactatcgccaagcgagagggcgcaggggacgcggaggctgacccactggagccgccacccccacagcagcagctgggcctgtccctgcggcgcagtgggaggcagcccaagcgcactgagcgcgtggagcagttcctgaccattgcgcggcgccgcggcaggaggagcatgcctgtctccctggaggattctggtgagcccacgtcctgccccgccacagacgccgagacagcctccgagggcagcgtggaaagcgcttctgagaccagaagcggcccccagtctgcttccacagctgtgaaggaacgaccagcctcttctgaaaaggtgaaaggaggggatgaccacgatgacacctccgatagtgacagcgatggcctgaccttgaaagagcttcagaatcgccttcgcaggaagcgggaacaggagcccactgagaggcccctgaaagggatccagagtcgcctgcggaagaagcgccgggaggagggtcccgccgagactgtgggctccgaggccagtgacactgtggagggcgtcctgcccagtaagcaggagcccgagaacgatcagggggttgtgtcccaggctgggaaagatgacagagagagtaagttggagggaaaggcggctcaggacatcaaagatgaggagcctggagacttgggccgaccgaagcctgaatgtgagggttacgaccccaacgccctgtattgcatttgccgccagcctcacaacaacaggtttatgatttgctgtgaccgctgtgaagaatggtttcatggcgattgtgtgggcatttctgaggctcgagggaggcttttggaaaggaatggggaagactatatctgcccaaactgcaccattctgcaagtgcaggatgagactcattcagaaacggcagatcagcaggaagctaaatggagacctggagatgctgatggcaccgattgtacaagtataggaacaatagagcagaagtctagcgaagaccaagggataaagggtagaattgagaaagctgcaaatccaagtggcaagaagaaactcaagatcttccagcctgtgatagaggcgcctggtgcctcaaaatgtattggccccgggtgctgtcacgtggcgcagcccgactcggtgtactgcagtaatgactgtatcctcaaacacgccgcagcgacaatgaagtttctaagctcaggtaaagaacagaagccaaagcctaaagaaaagatgaagatgaagccagagaagcccagtcttccgaaatgcggtgctcaggcaggtattaaaatctcttctgtgcacaagagaccagctccagaaaaaaaagagaccacagtgaagaaggcagtggtggtccctgcgcggagtgaagcactcgggaaggaagcagcttgtgagagcagcacgccgtcgtgggcgagcgatcacaattacaatgcagtaaagccagaaaagactgctgctccctcgccgtcactgttgtataaatgtatgtatcacctaggggttggcctcctggacccctcccgttctttctggatagccatcccctgggcctgtccaggactgggagttgcagctttgtgttaagctgatcacagacaccggctgcaccatcagcgggaagcagagcccatgtccaggatgcctcctgctgccctgtgtccatccctagtctgtcaggacttcctgtcactgttttccaaagctgtaaacctcactggtgaacgttcaccttaatgattgattctttaatctctgttttcactctcaggctctggtaagtattcgtattctcttcatcccagtctgattgcatagccacactgcccggcacgccacatccacccctgtctgcacatgagttgttctgacaacagcgctgtatacgcttcagtttttccacattgtccacggccagcacatgaaagcatcacttcttttttatgttgtgggaatctttgcaagttagtgttgcatctgattttcaggtgtacatttatttttgactgggcagataggggatttttttttttccatgtccgattcacacgctacacacccacatgaacacattcgaacttcgaaggccacacactcctgcttcataggccccacggtaagtgagttcacacctagaacactgtcctgaccgcaggacgcgtgccttggacttggtattctacatgtgactggctttcttgccctcgtctcttgaatgtttagactcttaagatcatatcctgccccaaatttcaaattaatgaaatgaagatatttcaaacagatctttgaaacctcagattctgtggtgcaattttaatgttttcttgtttctcagttttctgctataaaactattttcaattcagtc

SEQ ID NO: 5856 - protein, 562 aa, Homo sapiens
MDDKGDPSNEEAPKAIKPTSKEFRKTWGFRRTTIAKREGAGDAEADPLEPPPPQQQLGLSLRRSGRQPKRTERVEQFLTIARRRGRRSMPVSLEDSGEPTSCPATDAETASEGSVESASETRSGPQSASTAVKERPASSEKVKGGDDHDDTSDSDSDGLTLKELQNRLRRKREQEPTERPLKGIQSRLRKKRREEGPAETVGSEASDTVEGVLPSKQEPENDQGVVSQAGKDDRESKLEGKAAQDIKDEEPGDLGRPKPECEGYDPNALYCICRQPHNNRFMICCDRCEEWFHGDCVGISEARGRLLERNGEDYICPNCTILQVQDETHSETADQQEAKWRPGDADGTDCTSIGTIEQKSSEDQGIKGRIEKAANPSGKKKLKIFQPVIEAPGASKCIGPGCCHVAQPDSVYCSNDCILKHAAATMKFLSSGKEQKPKPKEKMKMKPEKPSLPKCGAQAGIKISSVHKRPAPEKKETTVKKAVVVPARSEALGKEAACESSTPSWASDHNYNAVKPEKTAAPSPSLLYKCMYHLGVGLLDPSRSFWIAIPWACPGLGVAALC

SEQ ID NO: 5857 - DNA, 2977 bp, Homo sapiens
gggagcgggagggcaggcgcaccggaggccgcccctcagcacctctcgcgacagcaagagagcgcgagagcgcgagccgatgaccaatgaagcgcccccgcgagggggcggggcggacggcctcccggaagcgcggaacctcagcttccgtacttgcgcagaactcccctcgcggcgaccacgcactacgggttggcgccagagtcaaaaggcgtcggccctctggcaagatggctgctgcggaggcgttggagcgcggaaatctggaaccgggatggcgacgtctacactgagtcggaggcgaaggagcttactccacgggaacagcctctagataatctgagttgttgaaaatacgaagcctgttactcgtgaacagtggctgacaacagtgttgttgtgagcctggctgtctgcttggacccagaggtttcgtctgccagggtttttggttgtatttaggatttcagggaaaagtgtccaagctttcagtgttggagcaggtatggacgacaaaggcgacccgagcaatgaggaggcacctaaggccatcaaacccaccagcaaagagttcaggaaaacatggggttttcgaaggaccactatcgccaagcgagagggcgcaggggacgcggaggctgacccactggagccgccacccccacagcagcagctgggcctgtccctgcggcgcagtgggaggcagcccaagcgcactgagcgcgtggagcagttcctgaccattgcgcggcgccgcggcaggaggagcatgcctgtctccctggaggattctggtgagcccacgtcctgccccgccacagacgccgagacagcctccgagggcagcgtggaaagcgcttctgagaccagaagcggcccccagtctgcttccacagctgtgaaggaacgaccagcctcttctgaaaaggtgaaaggaggggatgaccacgatgacacctccgatagtgacagcgatggcctgaccttgaaagagcttcagaatcgccttcgcaggaagcgggaacaggagcccactgagaggcccctgaaagggatccagagtcgcctgcggaagaagcgccgggaggagggtcccgccgagactgtgggctccgaggccagtgacactgtggagggcgtcctgcccagtaagcaggagcccgagaacgatcagggggttgtgtcccaggctgggaaagatgacagagagagtaagttggagggaaaggcggctcaggacatcaaagatgaggagcctggagacttgggccgaccgaagcctgaatgtgagggttacgaccccaacgccctgtattgcatttgccgccagcctcacaacaacaggtttatgatttgctgtgaccgctgtgaagaatggtttcatggcgattgtgtgggcatttctgaggctcgagggaggcttttggaaaggaatggggaagactatatctgcccaaactgcaccattctgcaagtgcaggatgagactcattcagaaacggcagatcagcaggaagctaaatggagacctggagatgctgatggcaccgattgtacaagtataggaacaatagagcagaagtctagcgaagaccaagggataaagggtagaattgagaaagctgcaaatccaagtggcaagaagaaactcaagatcttccagcctgtgatagaggcgcctggtgcctcaaaatgtattggccccgggtgctgtcacgtggcgcagcccgactcggtgtactgcagtaatgactgtatcctcaaacacgccgcagcgacaatgaagtttctaagctcaggtaaagaacagaagccaaagcctaaagaaaagatgaagatgaagccagagaagcccagtcttccgaaatgcggtgctcaggcaggtattaaaatctcttctgtgcacaagagaccagctccagaaaaaaaagagaccacagtgaagaaggcagtggtggtccctgcgcggagtgaagcactcgggaaggaagcagcttgtgagagcagcacgccgtcgtgggcgagcgatcacaattacaatgcagtaaagccagaaaagactgctgctccctcgccgtcactgttgtataaatgtatgtatcacctaggggttggcctcctggacccctcccgttctttctggatagccatcccctgggcctgtccaggactgggagttgcagctttgtgttaagctgatcacagacaccggctgcaccatcagcgggaagcagagcccatgtccaggatgcctcctgctgccctgtgtccatccctagtctgtcaggacttcctgtcactgttttccaaagctgtaaacctcactggtgaacgttcaccttaatgattgattctttaatctctgttttcactctcaggctctggtaagtattcgtattctcttcatcccagtctgattgcatagccacactgcccggcacgccacatccacccctgtctgcacatgagttgttctgacaacagcgctgtatacgcttcagtttttccacattgtccacggccagcacatgaaagcatcacttcttttttatgttgtgggaatctttgcaagttagtgttgcatctgattttcaggtgtacatttatttttgactgggcagataggggatttttttttttccatgtccgattcacacgctacacacccacatgaacacattcgaacttcgaaggccacacactcctgcttcataggccccacggtaagtgagttcacacctagaacactgtcctgaccgcaggacgcgtgccttggacttggtattctacatgtgactggctttcttgccctcgtctcttgaatgtttagactcttaagatcatatcctgccccaaatttcaaattaatgaaatgaagatatttcaaacagatctttgaaacctcagattctgtggtgcaattttaatgttttcttgtttctcagttttctgctataaaactattttcaattcagtc

SEQ ID NO: 5858 - protein, 562 aa, Homo sapiens; identical to SEQ ID NO: 5856

SEQ ID NO: 5859 - DNA, 2387 bp, Homo sapiens
ggagcttactccacgggaacagcctctagataatctgagttgttgaaaatacgaagcctgttactcgtgaacagtggctgacaacagtgttgttgtgagcctggctgtctgcttggacccagaggtttcgtctgccagggtttttggttgtatttaggatttcagggaaaagtgtccaagctttcagtgttggagcaggtatggacgacaaaggcgacccgagcaatgaggaggcacctaaggccatcaaacccaccagcaaagagttcaggaaaacatggggttttcgaaggaccactatcgccaagcgagagggcgcaggggacgcggaggctgacccactggagccgccacccccacagcagcagctgggcctgtccctgcggcgcagtgggaggcagcccaagcgcactgagcgcgtggagcagttcctgaccattgcgcggcgccgcggcaggaggagcatgcctgtctccctggaggattctggtgagcccacgtcctgccccgccacagacgccgagacagcctccgagggcagcgtggaaagcgcttctgagaccagaagcggcccccagtctgcttccacagctgtgaaggaacgaccagcctcttctgaaaaggtgaaaggaggggatgaccacgatgacacctccgatagtgacagcgatggcctgaccttgaaagagcttcagaatcgccttcgcaggaagcgggaacaggagcccactgagaggcccctgaaagggatccagagtcgcctgcggaagaagcgccgggaggagggtcccgccgagactgtgggctccgaggccagtgacactgtggagggcgtcctgcccagtaagcaggagcccgagaacgatcagggggttgtgtcccaggctgggaaagatgacagagagagtaagttggagggaaaggcggctcaggacatcaaagatgaggagcctggagacttgggccgaccgaagcctgaatgtgagggttacgaccccaacgccctgtattgcatttgccgccagcctcacaacaacaggtttatgatttgctgtgaccgctgtgaagaatggtttcatggcgattgtgtgggcatttctgaggctcgagggaggcttttggaaaggaatggggaagactatatctgcccaaactgcaccattctgcaagtgcaggatgagactcattcagaaacggcagatcagcaggaagctaaatggagacctggagatgctgatggcaccgattgtacaagtataggaacaatagagcagaagtctagcgaagaccaagggataaagggtagaattgagaaagctgcaaatccaagtggcaagaagaaactcaagatcttccagcctgtgatagaggcgcctggtgcctcaaaatgtattggccccgggtgctgtcacgtggcgcagcccgactcggtgtactgcagtaatgactgtatcctcaaacacgccgcagcgacaatgaagtttctaagctcaggtaaagaacagaagccaaagcctaaagaaaagatgaagatgaagccagagaagcccagtcttccgaaatgcggtgctcaggcaggtattaaaatctcttctgtgcacaagagaccagctccagaaaaaaaagagaccacagtgaagaaggcagtggtggtccctgcgcggagtgaagcactcgggaaggaagcagcttgtgagagcagcacgccgtcgtgggcgagcgatcacaattacaatgcagtaaagccagaaaagactgctgctccctcgccgtcactgttgtataaatgctctggtaagtattcgtattctcttcatcccagtctgattgcatagccacactgcccggcacgccacatccacccctgtctgcacatgagttgttctgacaacagcgctgtatacgcttcagtttttccacattgtccacggccagcacatgaaagcatcacttcttttttatgttgtgggaatctttgcaagttagtgttgcatctgattttcaggtgtacatttatttttgactgggcagataggggatttttttttttccatgtccgattcacacgctacacacccacatgaacacattcgaacttcgaaggccacacactcctgcttcataggccccacggtaagtgagttcacacctagaacactgtcctgaccgcaggacgcgtgccttggacttggtattctacatgtgactggctttcttgccctcgtctcttgaatgtttagactcttaagatcatatcctgccccaaatttcaaattaatgaaatgaagatatttcaaacagatctttgaaacctcagattctgtggtgcaattttaatgttttcttgtttctcagttttctgctataaaactattttcaattcagtc

SEQ ID NO: 5860 - protein, 544 aa, Homo sapiens
MDDKGDPSNEEAPKAIKPTSKEFRKTWGFRRTTIAKREGAGDAEADPLEPPPPQQQLGLSLRRSGRQPKRTERVEQFLTIARRRGRRSMPVSLEDSGEPTSCPATDAETASEGSVESASETRSGPQSASTAVKERPASSEKVKGGDDHDDTSDSDSDGLTLKELQNRLRRKREQEPTERPLKGIQSRLRKKRREEGPAETVGSEASDTVEGVLPSKQEPENDQGVVSQAGKDDRESKLEGKAAQDIKDEEPGDLGRPKPECEGYDPNALYCICRQPHNNRFMICCDRCEEWFHGDCVGISEARGRLLERNGEDYICPNCTILQVQDETHSETADQQEAKWRPGDADGTDCTSIGTIEQKSSEDQGIKGRIEKAANPSGKKKLKIFQPVIEAPGASKCIGPGCCHVAQPDSVYCSNDCILKHAAATMKFLSSGKEQKPKPKEKMKMKPEKPSLPKCGAQAGIKISSVHKRPAPEKKETTVKKAVVVPARSEALGKEAACESSTPSWASDHNYNAVKPEKTAAPSPSLLYKCSGKYSYSLHPSLIA

SEQ ID NO: 5861 - DNA, 3248 bp, Homo sapiens
ggaagctggtggcggctggtgggcgaccgggcgcatcctcattgcagtgcggcggccctacctcggccctggcctgaccccggcggccctgcccgcccctccctccagcatcatggccagcccaagaaccaggaaggttcttaaagaagtcagggtgcaggatgagaacaacgtttgttttgagtgtggcgcgttcaatcctcagtgggtcagtgtgacctacggcatctggatctgcctggagtgctcggggagacaccgcgggcttggggttcacctcagctttgtgcgctctgttactatggacaagtggaaggacattgagcttgagaagatgaaagctggtgggaatgctaagttccgagagttcctggagtctcaggaggattacgatccttgctggtccttgcaggagaagtacaacagcagagccgcggccctctttagggataaggtggtcgctctggccgaaggcagagagtggtctctggagtcatcacctgcccagaactggaccccacctcagcccaggacgctgccgtccatggtgcaccgagtctctggccagccgcagagtgtgaccgcctcctcggacaaggcttttgaggactggctgaatgatgacctcggctcctatcaaggggcccaggggaatcgctacgtggggtttgggaacacgccaccgcctcagaagaaagaagatgacttcctcaacaacgccatgtcctccctgtactcgggctggagcagcttcaccactggagccagccggtttgcctcggcagccaaggagggcgctacaaagtttggatcccaagcgagtcagaaggcgtccgagctgggccacagcctgaacgagaacgtcctcaagcctgcgcaggagaaggtgaaggagggaaagatttttgatgatgtctccagtggggtctctcagttggcgtccaaggtccagggagtcggtagtaagggatggcgggacgtcaccacctttttttcggggaaagcagagggccccttggacagcccctcggagggccacagttatcagaacagcggtctggaccacttccaaaacagcaacatagaccagagcttctgggagacctttggaagtgctgagcccaccaagacccgcaagtccccgagcagcgacagctggacgtgcgcggacacctccaccgagaggaggagctcggacagctgggaggtgtggggctcggcctccaccaacaggaacagcaacagcgacggcggggagggcggggagggcaccaagaaggcagtgccgccggccgtgcccactgatgatggctgggacaaccagaactggtagggcccactgcgcccccgtccccagcgcccccgggcgacttcgtgtttgcactctgccctcgtcgttcctcctccttccatttgacccaagaatcagcaactgcagtgtgaggacagcgtctcgggaggcaggaccctagggagacccgggtgtgcgccgcctgcgcgtggggagtcttcggtgcgtgggggcggcttgctgtccagcctgtgtgggggccgtcccgtcccacactcccctgggcattcttggactcaaggccggggctctgcgtggcttgctgggaggtgggctgcagcacagaggcctgtgactgcgttccagcggccagttcactacgcagtatctctggggcctgggaccagccacgtgccgagctgtcagcgacgtgaggtgtcccttctcgttgagatatttaactttggttttgctctagttctttctttttgaagagagtgactggagtggtaaagatggaaatgctggaaatgatactggcgctcacgctgccatccgaccaccctcggctcccgagtccacgcctgcctgggcctgtgctgtcagacccgcgtcggtcgtaaccctctgtggctcccctgcatcagcaccgtcccaccaccaagttcaccaggttcaccagacacggcctccacaatagccacacccacacctgagctgtcctcagtgctggaacttgaccatcctggaacaccctggaagaaaaaggagcgcagggtgggccctcggccctgatgcaggagggtgcgatagcggacgtggccaggcaggaggggccgggttcaggagctgagcaggggatgcctgtgcgtggtgcctgggtctagggaagctccagccccaggatggggctgccctgcacaccggtgcccgccacatgccaaccctcacctccccgaggactggatgatgtgctgccacgtgtgactcgtctcccttgtctgccctgtgtgaccctcagtcttggccagccatgcatgcgcccgaagctcgtgcagtttgtacgtgaggtgctctcctccctgccaccatgctcatcactctggccttggccatgctccctggtcaccccacttcccggtcgccgtctgcagcactcctggagcagcctgggcccttcagcccctgtgctcgtcccaccctagggactcagtcacttgcagaacaggatgggaccgagatttcagcgagccctcctggcgcccggtcctccctgtgggcaccagccctcttggtagctggtgtggagggccggtgtccttggctgccacggagggatttgatcaccgaagcagccacctgctgtagttggacctgaggtcagaggcggggcatcagaggctcaaggtgctgagaagccaccgggaaagcagccagcacaaagggcccaggaagccagcccccgagagctgagcgtgggggtctttgagtgtctttctccaagctgagacgtgggcggccgcgtggtatctcccgagggctgcttggaccctggtgggctgagtgctccgaggaggggtggactccaccttggacagtgggatgtggtgttccacatgtgcctgtttccacgccagcaccttgacttggcagcatggagccaaggtctgtccccgcccaggagggtgccttcctcgggggtagggggacggcccactctgccccagggagtcccttttgatgggaagtgcagtcagcagcgtggaggtgtctgggccaccttcagaaggtggatgtggtggccgagaccccgtccacggagggtgatggcctttcccttctgcaggtgcgggcaggtgggcctgggaccggtgctggggcctctccttgctgtgtgtgagggcccaggtggaaggcgcggacctgacagcattccaataaagcatacgggaacatg

SEQ ID NO: 5862 - protein, 406 aa, Homo sapiens
MASPRTRKVLKEVRVQDENNVCFECGAFNPQWVSVTYGIWICLECSGRHRGLGVHLSFVRSVTMDKWKDIELEKMKAGGNAKFREFLESQEDYDPCWSLQEKYNSRAAALFRDKVVALAEGREWSLESSPAQNWTPPQPRTLPSMVHRVSGQPQSVTASSDKAFEDWLNDDLGSYQGAQGNRYVGFGNTPPPQKKEDDFLNNAMSSLYSGWSSFTTGASRFASAAKEGATKFGSQASQKASELGHSLNENVLKPAQEKVKEGKIFDDVSSGVSQLASKVQGVGSKGWRDVTTFFSGKAEGPLDSPSEGHSYQNSGLDHFQNSNIDQSFWETFGSAEPTKTRKSPSSDSWTCADTSTERRSSDSWEVWGSASTNRNSNSDGGEGGEGTKKAVPPAVPTDDGWDNQNW

SEQ ID NO: 5863 - DNA, 7505 bp, Homo sapiens
caccaagccaggatccgcgcactcctggtgggtcagagtggagagagaccggcccccagttccgctgcctgccccccgtgcctgctgacatggtcttcctggtggacgggtcctggagcattggccacagtcacttccagcaggtcaaggacttcctggccagtgtcatcgcaccctttgaaatcgggccggataaggtccaagtaggcctgactcagtacagcggggatgctcagactgagtgggacctgaactccctcagcaccaaggaacaggtgctggcagctgtgcgccgcctccgctacaagggggggaacacgttcacaggccttgccctgacccacgtgctggggcagaacctgcagccggcggctggcctccgtccagaggcagccaaggtggtgattctggtgacggacggcaagtcccaggacgatgtgcacactgctgcccgtgtcctcaaggacctgggcgtgaacgtcttcgctgtgggtgtgaagaacgccgatgaggctgagctgaggctcctggcgtccccgccgagggacatcaccgtccacagcgtgctggacttcctgcagctcggcgcgctggctggcctgctcagccgtctcatctgccagaggctccagggtgggagcccgcggcagggcccagcagcggctccagccctggacaccctccctgcccccaccagcctggtcctgagccaggtgacctcctccagcatccgcctgtcctggactccagccccccggcaccccctcaagtatctgatcgtttggcgagcctctagaggtggcacccccagggaggtggtggtggagggacccgccgcctccacggagctgcacaacctggcctcccgcacagagtacctggtctccgtgttccccatctatgagggcggggttggcgaaggcctgcggggcctggtgaccacagcacctctgcctccgccccgggcgctgaccctggccgcagtgacgcccagaaccgtccacctcacctggcagccctcggccggggccacccactacctggtgcgatgttctcctgcttcccccaagggtgaagaggaggagcgagaggtgcaggtcgggcggcccgaggtgctgctggatggcctggaacctggcagggactatgaggtctcggtgcagagcctgcgaggccctgagggcagcgaggcccggggcatccgtgccaggacccccaccctggcccccccgagacacctgggcttctcagacgtgagccacgacgcggcacgagtgttctgggagggtgccccgaggcctgtgcgcctggtcagggtcacctatgtgtccagcgagggtggacactcggggcagacagaggctcctgggaacgccacctcggccacgctggggcctctctcttcctccaccacctacactgtccgtgtcacctgcctctaccctgggggtggctcctctacgctgactggccgggtgaccaccaagaaagctcccagcccaagccagctgtccatgacggagctgccaggggatgcagtccagctggcgtgggtggccgcagccccgtctggcgtgcttgtctaccagatcacgtggacgcccctgggagaggggaaggctcacgagatctctgtcccagggaacctcggcacggccgtcctgcctggcctagggaggcacacagagtacgacgtcaccatcttggcctactacagggacggggcccgcagtgaccctgtgtccctccgctataccccctccacggtgagcaggagcccaccctccaacctggccctggcctcggagacccccgacagcctgcaggtcagctggacgcccccgcttggccgcgtgctccattactggctcacctacgcccccgcctctggcttgggacccgagaaatccgtctctgtgccaggagccaggagccacgtgacactgcccgacctgcaggcagccacgaagtacagggtcctggtctcagctatctatgcagcaggcaggagtgaggctgtgtctgccacgggccagacagcctgcccagccctccgccctgacggctccctcccagggtttgacctgatggtggccttcagcctggtggaaaaggcttatgcgtccatccggggcgtggccatggagccctctgccttcggtgggaccccgaccttcacgctcttcaaggacgcccagctgacaagacgggtcagtgacgtctacccagcccccctacctccagagcacaccatcgtcttccttgtgcgcctacttcccgagacaccccgtgaggccttcgcgctgtggcagatgacagccgaggacttccagcccctccttggggttctgctggatgccgggaagaagtccctgacctacttccaccgtgaccccagggctgccttgcaggaggccaccttcgacccgcaggaagtgaggaagattttcttcgggagcttccacaaggtgcacgtggctgtgggccgctccaaggtcaggctctatgtggactgccggaaggtggctgagcggccccttggggagatgggcagcccacccgctgcgggcttcgtcacgctggggaggctggccaaggccaggggcccccggagcagttcggccgcgtttcagctccagatgctgcagatcgtgtgcagtgacacctgggccgatgaggaccggtgctgtgagctccctgcctcgagggatggagagacctgccccgccttcgtgtctgcctgttcctgttcctcagagacccctgggcccccaggacctcaaggacccccaggcctccctgggaggaatggcaccccaggagagcagggcttcccagggcccaggggtccaccaggggtcaaaggagagaagggagaccatgggcttccaggcttgcagggccaccccggccaccagggcatccccgggagagttggcctccagggaccaaagggaatgagaggcctggagggaactgctggcctgcctggacccctggccccagggggttccagggcatggcaggggccaggggcactagtggagagcgaggacctccagggaccgtggggcccacaggactgccagggcccaaaggggaacgaggagagaagggcgagccgcagtcccttgccaccctctaccagcttgtgagccaggcctgtgagtctgccattcagacacacgtgtcaaagttcgactccttccacgagaacaccaggccccccatgcccatcttggagcagaagctggagccgggcactgagcccctggggtcccctggcacccgcagcaaggccctggttcctggagaatgggggcgtggtggccgccaccttgagggcagaggggagcctggagctgttggtcagatgggcagccctgggcagcagggggctagcacccagggcctctgggagtgacaggacattttctgcactgccccgaggaacgctgagccttcctccctgggtttgtctggacaccgagagcgaccacatcctggagaagccaggagaaaagctcaggaagagcctgcaggtggaaggagagggaagcagcggcctcggccaaggcccaccccatactcttggctctgtagcatttccaagttcagataaacccctgagtgctcacccagccaagcgaggcgggagtcatttcctgggagagtgtcccccaccctggctctgtgcaccccaccttgaggccctgcagcttcagccgcagtggggaaggggaggggctgggctgatggcgaatcgggttcaggagggcagcagtgccctgtggccgtctcagtagctctaaaacaggctcaacaacatgccccgcccctttctctgggcctcatctaagcctggccagggccctgtgggcccgcctctctctgcgcctcacgcaggcaacagatggttccactgctggcccaccagtcacctgcacgatggctcctccctcagaacagcactcccaccccggccccagcaccttcacatctgggcacaggcaggtccctgcctgcctcatcgtcccctctgtccccagcccaagaaggagttcagatcctgtgtgtgaatggccacccctcacccacccagccctgtgctgagttccttgtgcagggacattgctttgagacttggcaccatcagcccctggtccttagggtctcagagcaaggtcatccctcagcaggcttctggcctgtgcgctcctcagcacctctgcccaggtctctcccaaccatcacagacgctgtgtgagcctggacttcctgccttatccccactgtggcccaaacagcatgggggcaagctcagaacacacacctgggcttctgggccttgtggcccgtgggggtgatgtgggaacttctacttcctttccaaacaaatattcagtaactagtccactgttaccacttaggcagctaagcaagaaaggtgccagaaatgaagagggaagccatatcattgaggagagaatgaaaagtattaaaaaggaacaaagagagacccttgatattgacagaaggaaaacccaccaagatcaccagtgcagcattgcgtgcaccaaagcataccccaaagaggtgagcgcaaaacagcttcagggcaaacacttcatctatgattcaactgttccaggaactgaccagacctggagaccaaatagagagtcataggcagggtcagcaggatgggagagagcgcctgcacccacaggagccacagccctgactgaggccaggaagcagccccaaatgccagctcccactgcagcatgagaacagaaacagaccactgaaaattcccaaagtctgtggacaaatcagacgtcgaagaagtcacgtggcatcgagacagattttgcactgagggacaaggagagcatgtggccaaagtaggtgcaggtaaagcagcatctggggcagagttatagccttcagtgcaggtatcagacacagttgttgagagcagcagcccaagccagcccctccgtcctgcagggaggacacctaggtcacttggcttctgttggggagctgagttgcttcagattgtgtgaccagcaaaacagcttggttgctctcacttggtttctccagggcggggaattacatgtccccagctgaactgagaaggctctttgagcagtggagtgagcaggctttgtcatgaggcaggagtggggctagaatcaagcccagagcccacagggcatccagagccttccaaaggagcccctctcctggggctctccaatttgatgaagggactgggcactgggtggctgagaccacattggcagccaggaggaggcagcctggccggggggaaccagggtggctctaatccccaccaccccctcagctgccctacccccgccacgctggtgtgacaccagtgatgctcagcctcaaaaggggagtccggctgtcttcgggaaactgactttatgctggaggccaattaaaatggcacagcaaaggcagcggccagctggtgcccaggcagcttagggactggtccctgaggccccacccgccccagcctgtgcagtggagctgagtacgaatcaaaggtgaggatggcaagggagctgagagcagcctccggatgcaccaaaccggcctggctcctgtttgcaggaaggcagcctccccgagacccagccgacctgcacgtctcccatcagccccgactccaccgcatccctctgggtccttttaggagcccccagggactgagccggggctcacgctcctggccagagcgctgggtttctggcaatgcctcccctcctgcctttacggccacagctctcccctccagaggcccctctgtagtgggcctcggtcccctctccacccccagaggcagcacagcttcagccctacgcagtgtgggggctccgggaggaaatgcagggaggtgcttggtcttggcccagagctcatggccttaggtgctgcccccagtcacccccgtgcccatgcagccggggatgttcagctcaggccagccaccgaggtggtgtgacgcaaggctgatctgacgctcagctcaggccgctggggtcatgggggttgtgggaaggtcatggaatcacggggctcacgctggggtcacagggtggtgtggctgtgtggactgtaaggggcgtgcagccatgcgtatctgacctgccctccctaggtctgcaggcagtgccgagtggctctgcctgaggccccaagagcgaccttggaagctccaggccttcacagcccctctgagagccacctgcaaggtggggagctgggaagaacggctcagtgatgagctcagagggaggggtgggcacagcgcccaggaaggcgggtgcgtgcaggcctgggaggaatgtgtagcaggaggcagggggtgctgtgcccgcaggaccagcaggtgaggcgtgtccacccacagaggatggctctggcccaggcagtgtcagaaatggaagctgaggaaacccaaccccagctgtagaggagcctgccccgatgccatctgcacctggggggcgacgtatggctgccagcctcttcatctaccaaggaccagggcagtggggacgggagagctgggacacgtggactcacaccagggcagatggtgggggaagccagtgtctgtagattcagtgcatttcttggggaagggcgtggaacatttggacttgagccccagcacagagacgatgtcataatacagccccccatcgtgatctgatggtaagtacagaactccttgcccagtggagaaacactctcctctcatgtgtggaatatccacacactaaccatgaactgggccataagaaaccttacattccaaaggatcctgctgttcagaactcactcactcactgatgaaactggaaaaacaaccaatgataacaagctaaagaatgcctctagaagctaaaagacacacccatgactccacagtaattcatgggttaaagagaaaaaaggaaacgtgaagatacttgtaaccaaataatgatggatgcagcgccacgtcagaatctctgtgctgcagctgcagtggtacctagagggcaatttatagctgtaaatacagtgctttgttttgttttcttgttttttgagacaaggtcttgctctgtcacccaggctggagtacagtggcatgatctcggctcaatgcaacctctgtgccaccctgggctcaagtggtcctcctgctccggtcttctgagtagcaggaaccacaggcgtgcgccaccacgcttggctaatgttttttgtatttttttaaatagagacagggtgttgccgtgttacccaggctggtcttgaacttctgagctcaaacgatccaccctccttggcctcccaaagtggtgggattacaggtgtgagtcacctcaccggcccttaaacacagtttttagggaagattccaactcaaacaattttaaatagtagaaaataaaccctgaagcagtgtg

SEQ ID NO: 5864 - protein, 337 aa, Homo sapiens
MVAFSLVEKAYASIRGVAMEPSAFGGTPTFTLFKDAQLTRRVSDVYPAPLPPEHTIVFLVRLLPETPREAFALWQMTAEDFQPLLGVLLDAGKKSLTYFHRDPRAALQEATFDPQEVRKIFFGSFHKVHVAVGRSKVRLYVDCRKVAERPLGEMGSPPAAGFVTLGRLAKARGPRSSSAAFQLQMLQIVCSDTWADEDRCCELPASRDGETCPAFVSACSCSSETPGPPGPQGPPGPPGVKGEKGDHGLPGLQGHPGHQGIPGRVGLQGPKGMRGLEGTAGLPGPLAPGGSRAWQGPGALVESEDLQGPWGPQDCQGPKGNEERRASRSPLPPSTSL

SEQ ID NO: 5865 - DNA, 803 bp, Homo sapiens
ggcacgaggctctgtcgtggcgcggcttcccgcggtcttctctgcaaatgggctccgtggcctagcgcccccgtccccgccacccgtgatcgtgcgccgaggcccgcgaggggtcgccgcccagatcccaccagccagcaagctaaagcatggcggccatcccctccagcggctcgctcgtggccacccacgactactaccggcgccgcctgggttccacttccagcaacagctcctgcagcagtaccgagtgccccggggaagccattccccaccccccaggtctccccaaggctgacccgggtcattggtgggccagcttctttttcgggaagtccaccctcccgttcatggccacggtgttggagtccgcagagcactcggaacctccccaggcctccagcagcatgaccgcctgtggcctggctcgggacgccccgaggaagcagcccggcggtcagtccagcacagccagcgctgggcccccgtcctgacctgagcggttaccaccagccccaggcctgcggaggcgctagtccaccagagcccctccccgcccctctccccactccgcatccctcgcccccctccccacctcccaccccccaccctgtaaactaggcggctgcagcaagcagaccttcgcatcaacacagcagacaccaaaaaccagtgagagccccgctctctaccgcccggccccagcactcgctagctttcctgacacctggaactgtgcacctggcaccaagcggaaaataaactccaagcagccagtagccccgaaaaaaaaaaaaaaaaaa

SEQ ID NO: 5866 - protein, 114 aa, Homo sapiens
MAAIPSSGSLVATHDYYRRRLGSTSSNSSCSSTECPGEAIPHPPGLPKADPGHWWASFFFGKSTLPFMATVLESAEHSEPPQASSSMTACGLARDAPRKQPGGQSSTASAGPPS

SEQ ID NO: 5867 - DNA, 7482 bp, Homo sapiens
tgctcacctctgacagccagacaagggctgtgctcaggggcagctcggctgggcacacagtaggtgctttagcggacagcactgaggcccccagcaagaagcccatgagctcctccccctcccgcagtgccgccgacatctacatccgggagtatttccacagccacgtcagcggcggccaccccgaggccactcctctccgtgtgatgtacacggaccggccgctgagccagacggacccagtcacgctgcagtactgttgcctgaccgacgaccgccaggctttccgcccgcccacacgggcagagctggcgcggcaccgcgtggtggtcaccaccacctcccaggcccgtgagctcagggtgccggtcggcttcttctcccacattctcatcgatgaggcggcccagatgctggagtgcgaggccctcaccccgctggcctatgcctcgcacggcacccgcctcgtgctggcgggcgaccacatgcaggtcacaccccggctgttcagtgtggccagggcccgggcggccgagcacacgctgctgcaccgcctcttcctgtgctaccagcaggagactcacgaggtggcgcggcagagccgcctggtcttccacgagaactaccgctgcacggacgccattgtcagcttcatctcgcggcacttctacgtggccaagggcaaccccatccacgccaggggcaaggttccgccccacccccggcactacccgctcatgttctgccacgtggcgggcagcccagaccgggacatgtccatggcgtcctggctgaatctggctgagattgcgcaggtcgtcgagaaggtgcaggaggcctacaacacctggcccagctgctggggcggccgcgagcagaggtgcatctgtgtcgtttcccacggtgcccaggtcagtgcactgaggcaggagctgaggaggcgggacctaggccaggtgtctgtcggcagttttgagatcctgccagggcggcagttccgggtcgtggtgctcagcactgtgcacacctgccagagcctgctcagccctggggcactggcccctgagttcttcaccgacgcccgcgtgctcaacaccgtcctgacccgcgcccagtcccagctggtggtagtgggggacgccgtggccctctgctccttcggggcctgcggcaagctctgggagagcttcatccgtgagtgcgtggagcggcacagtgtctgccccgagggcctgtccatggagcaggtcgagcagggtgtggcgcagagacggcgctggcctccccgaggcacacaggctggggcagcggggaactgggaggctgccccagagccagtaggggacctggccgaggagcaggcggctgtggtgacggccatggtgaaggcagagccgggagatgaggctctgagcccagcatcccgtgacatcacggcaaccacagcgcagacggaggctgcggcagcaccagcaggagacgcagtgaaggaagacgtggtgcccggggcctgtgcggcaggagcggctgctgcagcgggcgtggagtccacggaggctgaggatgcagaggctgacttctggccgtgggacggggagctcaacgctgacgacgccatcctacgggagcttctggacgagagccagaaggtgatggtgaccgtcggggaggacgggctgctggacactgtcgccaggcccgagtccctgcagcaggcccggctgtacgagaacctgcccccggctgcgctacggaagctgctgcacgcggagcccgagcggtaccgccactgctctttcgtgccagagaccttcgagcgggcgtcagccatcccgctggacgatgcctcctcgggccccatccaggtcaggggccgcctggactgtgggatggccttcgccggggatgaggtgctggtgcagctcctttcgggagacaaggcgcccgaggggcggcttcggggccgcgtgctgggcgtgctgaagaggaagaggcacgagctggcgtttgtgtgccgcatggacacgtgggacccgcgcatcatggtccccatcaatggctccgtgaccaagatcttcgtggccgagctgaaggacccatcgcaggtccccatctacagcctccggaagggccggctgcagcgtgtggggcttgagaggctcaccgccgaggcccggcacagccggctcttctgggtccaaattgtcctgtggcggcaaggcttctactacccgctgggcatcgtccgggaggtgctgcctgaggccagcacctgggagcagggcctccgcatcctcggcctggagtacagcttgagggtgcccccgtcggaccaggccaccatcaccaaggtgctgcagaaataccacacggagcttggccgggttgccggccgccgagaggactgccgcgccttcttgaccttcactgtggacccccagggcgcctgcaacctcgatgatgccctcagtgtccgagacctgggtcccaggtgcgaggtggctgtgcacatcactgatgtggccagcttcgtgcccagggacggggtgctggacgtggaggcgcgaaggcagggcgctgcgttctatgcccccggcagggagccagtgcccatgctgccggccagcctctgccaggacgtcctcagcctcctgcctggccgggaccgcctggccatctccctgttcctcaccatggagaaggccagtggccagctgaagagcctgcgctttgcaccctccgtggtccagtctgaccgccagctgtcctacgaggaggcggaggaggtgatcaggcagcacccgggtgccggccgtgagctgccggcccgcctggactccgtggacgcctgcgtcgtggccgcgtgctacttctctcggctgctgcgccggcaccgcctgcggtccgactgcttctatgagcagccggacgaggacggcaccctgggcttccgcgcggcccacatcatggtgaaggagtacatgattcagtttaataggctcgtggctgagttcctggtgggcagcgagtgcacgcggacggtcacgcctctgcggtggcagccagcaccccgcagccagcagctcaaggccctgtgtgagaagcatggggaccgggtgcccctgtcactgcacctcggccaccacctgcacggcggcgggggcagtccccccgacacgcggctgcacctcctggcctccctctggaagcaggtccagtttgctgcccgcacccaggactacgaacagatggtggacttggtcaccacggacgacatgcacccattcctggctcctgcaggccgcgacctccgcaaggccctggagcgctcggcgttcggccgctgcgcccggggccaccagcagcagggcggccactactcgctgcaggtggactggtacacgtgggccacctcgcccatccgcaggtacctggacgtggtgttgcagcggcagatcctgctggcgctgggccatgggggctctgcctactctgccagggacatcgatgggctctgccaggccttcagcctccagcacgcacttgcccagagctatcagcggcgggcgcgcagcctgcacctggccgtgcagctcaaggcccagcctctggacaagctgggcttcgtggtggacgtggaggcgggctcccgctgcttccggctgctcttccccagcaaccgggagacgctgcctgacccctgccccgtcccctacggctccctgcagctggccgagcacccccacgccctggcaggccggccgggcctgcggctcctgtggcggcgccgtgtctactcagcgcagggatccagcccgcccctgccactgcctggcactgtgccggacccacacaccctggccgtggagacggccctgtggaagcagctgctggagctggtggagctgcagcgctggccggaggcggctgctctcatccaggagaagggcgaggcgtcccagcggcgggagctggtgcaggtgcagcggagccactgtggccatttcctggaggtggcccgggagctgggcagtggggacaccctgcaggtgcagctcggcaccagcctgcagcacggcttcctggtaccgagccctcagctctggacggtggcaccgggcttcagcctctgcctggagcacgtggagcggcccggagactgcttctcaggccgtgtgtaccgggccccgagggaccggtaccgcgacgtggatgagtacgcctgcgtgtgggaaccattctgcgccctggagtcggccaccggcgcggttgccgagaatgactccgtcacacttcagcacctgagtgtctcctgggaggcgtcacggacgccgcaggggcagctgcagggcgccttccgcctggaggccgccttcctcgaggagaactgtgccgacatcaacttcagctgctgctacctctgcatccggctcgaggggctgccggctcccacggccagcccacgccctgggcccagcagcctcggccctggcctgaatgttgaccccggcacgtatacctgggtggcccacgggcagacgcaggactgggaccaggagcgccgggcagaccggcaggaggctcccagacgggtgcacctcttcgtccaccacatgggcatggagaaggttccggaagaggtgctgaggccgggcaccctgttcaccgttgagctgctgcccaagcagcttcctgatctccgcaaggaggaagccgtgcgtggactagaggaggcgtccccgctggtcaccagcatcgcactgggccggcctgtcccgcagcccctctgcagagtgatccccagcaggttcctggagcggcagacctacaacatccccggaggccgccacaagctgaaccccagccagaacgtggcggtcagggaggctctggagaagcctttcacggtcattcagggcccaccaggtacagggaagacgatcgtgggcctccacatcgtattctggtttcataaatcaaaccaggagcaggtgcagcccggaggccccccccgtggggagaagcggctggggggtccctgcatcttgtactgcggcccctccaacaagtcggtggatgtcctggcaggactgctcctgagaaggatggagctgaagcccctccgtgtgtacagtgagcaggctgaggccagcgagttcccagtgccgcgtgtgggcagcaggaagctgctcaggaagagcccccgggaggggaggccgaaccagagcctcaggagcatcaccctgcaccaccggatccggcaggcccccaacccttactcgtcggaaatcaaggcctttgacacccggctgcagagaggggagctcttctccagggaggacctggtctggtacaagaaggtcttgtgggaggctcggaagttcgagctggaccggcatgaggtcatcctctgcacctgctcctgtgcagcctctgccagcctcaaaatcctggacgtgaggcagatccttgttgacgaggcaggcatggccacggaacctgaaaccctcatccccctggtgcagttcccacaggccgagaaggtggttcttctcggagaccacaagcagctgcggcctgtggtcaagaatgagcggctgcaaaacctgggtctggaccggtctctgttcgagcggtaccacgaggacgcacatatgctggacactcagtaccgcatgcatgagggcatctgtgccttcccctctgtggcgttctacaagagcaagctgaagacgtggcagggcctgaggaggccgcccagtgtcctgggccacgctggcaaggagagctgccctgtcatctttggccacgtgcagggccacgagcggagcctgctggtgtccacggacgaagggaatgagaactccaaggccaacctggaggaggtggctgaggtggtccgtatcaccaagcagctgaccctggggaggaccgtagagccccaggacatcgccgtcctcacgccctacaacgcgcaggcctctgagatcagcaaggcccttcggcgagagggcatcgccggggtggccgtgtcctccatcaccaagagccaggggagcgagtggcgctatgtgctggtgagcaccgtccgcacctgtgccaagagcgacctggaccagcggcccaccaagagctggctcaagaagtttctgggcttcgttgtggaccccaaccaagtgaatgtggctgtcacgcgggcccaggaggggctctgcctgatcggagaccacctccttctgcgctgctgccccctctggcgtagcctcctggacttctgcgaggctcagcagaccctcgtgcctgccggccaggtgcgcgtctgcaggaggccaactatgccttcctgaagagccctctccacctgcaaggtgccaggactgggagggaaagtccagggcccccccaccctccccaccaccctccgccatcagcctgcctgggccagcctgcctcctggcctcaggatctccctggggcaggaagtgggtggacttggaggaggaacggcaagggccggtccccacactcttgctcctcctgggcatctggggacaggaacacctctcagggtggccaagaggggcttccttgggaccagtgcaaggaagttctgctgtccctgggaagtctcagaaccaggaaggaaaccctgtggaggctgccctttgacctttggacgccacctgtaatcactctggatggtgtctgtggagttcaggtttattttctatttaaatgaactaaaagccagcatcctgccgggcgtggtggctcacgcccataatccagcactttgggaagccgaggcgggcagatcacctgaggtcaggagttcgagaccatcctggccaacatggtgaaaccccgtctccactaaaaatacaaaattagctgggcgtggtggcgggcgcctgtaatcccagctacttgggaggctgaggcaggagaatcgcttgactccaggaggcgcaggctgcagtgagctctgatggtaccactgcactccagcctgggtgacagagcgagaccctgtcttaaaaaaaaaaacaaaacaaaaccagcatctgttactggaacagagacctcagcccaagctcaggacaaggaggcctccctgggagagggggcctttctcccaccatcaccgcctgtgtccttcaggggctgctggagggcagcccaaagccaggggcccaccccgccccaccccaccccaccccaccctctgaaatgtgaaaagcctgcactcttcctgtgggctgcgcagtgggctcgggggttggggggtgccggggcgatgcttccaccctggactgagtgttcggggcagcctgctcggctgtatgtttctcgcacgctcacccgcttcagtgcggctctgtccctgctgccgcctccagtcctgagggaggggcttgccccaccttctacattccaatttttatatctttgaattatgtgattagatattaatttaatgat

SEQ ID NO: 5868 - protein, 2080 aa, Homo sapiens
MSSSPSRSAADIYIREYFHSHVSGGHPEATPLRVMYTDRPLSQTDPVTLQYCCLTDDRQAFRPPTRAELARHRVVVTTTSQARELRVPVGFFSHILIDEAAQMLECEALTPLAYASHGTRLVLAGDHMQVTPRLFSVARARAAEHTLLHRLFLCYQQETHEVARQSRLVFHENYRCTDAIVSFISRHFYVAKGNPIHARGKVPPHPRHYPLMFCHVAGSPDRDMSMASWLNLAEIAQVVEKVQEAYNTWPSCWGGREQRCICVVSHGAQVSALRQELRRRDLGQVSVGSFEILPGRQFRVVVLSTVHTCQSLLSPGALAPEFFTDARVLNTVLTRAQSQLVVVGDAVALCSFGACGKLWESFIRECVERHSVCPEGLSMEQVEQGVAQRRRWPPRGTQAGAAGNWEAAPEPVGDLAEEQAAVVTAMVKAEPGDEALSPASRDITATTAQTEAAAAPAGDAVKEDVVPGACAAGAAAAAGVESTEAEDAEADFWPWDGELNADDAILRELLDESQKVMVTVGEDGLLDTVARPESLQQARLYENLPPAALRKLLHAEPERYRHCSFVPETFERASAIPLDDASSGPIQVRGRLDCGMAFAGDEVLVQLLSGDKAPEGRLRGRVLGVLKRKRHELAFVCRMDTWDPRIMVPINGSVTKIFVAELKDPSQVPIYSLRKGRLQRVGLERLTAEARHSRLFWVQIVLWRQGFYYPLGIVREVLPEASTWEQGLRILGLEYSLRVPPSDQATITKVLQKYHTELGRVAGRREDCRAFLTFTVDPQGACNLDDALSVRDLGPRCEVAVHITDVASFVPRDGVLDVEARRQGAAFYAPGREPVPMLPASLCQDVLSLLPGRDRLAISLFLTMEKASGQLKSLRFAPSVVQSDRQLSYEEAEEVIRQHPGAGRELPARLDSVDACVVAACYFSRLLRRHRLRSDCFYEQPDEDGTLGFRAAHIMVKEYMIQFNRLVAEFLVGSECTRTVTPLRWQPAPRSQQLKALCEKHGDRVPLSLHLGHHLHGGGGSPPDTRLHLLASLWKQVQFAARTQDYEQMVDLVTTDDMHPFLAPAGRDLRKALERSAFGRCARGHQQQGGHYSLQVDWYTWATSPIRRYLDVVLQRQILLALGHGGSAYSARDIDGLCQAFSLQHALAQSYQRRARSLHLAVQLKAQPLDKLGFVVDVEAGSRCFRLLFPSNRETLPDPCPVPYGSLQLAEHPHALAGRPGLRLLWRRRVYSAQGSSPPLPLPGTVPDPHTLAVETALWKQLLELVELQRWPEAAALIQEKGEASQRRELVQVQRSHCGHFLEVARELGSGDTLQVQLGTSLQHGFLVPSPQLWTVAPGFSLCLEHVERPGDCFSGRVYRAPRDRYRDVDEYACVWEPFCALESATGAVAENDSVTLQHLSVSWEASRTPQGQLQGAFRLEAAFLEENCADINFSCCYLCIRLEGLPAPTASPRPGPSSLGPGLNVDPGTYTWVAHGQTQDWDQERRADRQEAPRRVHLFVHHMGMEKVPEEVLRPGTLFTVELLPKQLPDLRKEEAVRGLEEASPLVTSIALGRPVPQPLCRVIPSRFLERQTYNIPGGRHKLNPSQNVAVREALEKPFTVIQGPPGTGKTIVGLHIVFWFHKSNQEQVQPGGPPRGEKRLGGPCILYCGPSNKSVDVLAGLLLRRMELKPLRVYSEQAEASEFPVPRVGSRKLLRKSPREGRPNQSLRSITLHHRIRQAPNPYSSEIKAFDTRLQRGELFSREDLVWYKKVLWEARKFELDRHEVILCTCSCAASASLKILDVRQILVDEAGMATEPETLIPLVQFPQAEKVVLLGDHKQLRPVVKNERLQNLGLDRSLFERYHEDAHMLDTQYRMHEGICAFPSVAFYKSKLKTWQGLRRPPSVLGHAGKESCPVIFGHVQGHERSLLVSTDEGNENSKANLEEVAEVVRITKQLTLGRTVEPQDIAVLTPYNAQASEISKALRREGIAGVAVSSITKSQGSEWRYVLVSTVRTCAKSDLDQRPTKSWLKKFLGFVVDPNQVNVAVTRAQEGLCLIGDHLLLRCCPLWRSLLDFCEAQQTLVPAGQVRVCRRPTMPS

SEQ ID NO: 5869 - DNA, 1536 bp, Homo sapiens
atggacgaggagagcctggagtcggccttgcagacctaccgtgcgcagctgcagcaggtggagctggccttgggcgccggcctggattcgtctgagcaggctgacctgcgccagctgcagggggacctgaaggagctcatcgagctcaccgaggccagcctggtgtctgtcaggaagagcagcttgttggccgcgctggacgaagagcgcccgggccgccaggaagatgctgagtaccaggctttccgggaggccatcactgaggcggtggaggcaccagcagcggcccgtgggtccggatcagagaccgttcctaaagcagaggcggggccagaatctgcggcaggtgggcaggaggaggaagagggagaggacgaggaagagctgagtgggacaaaggtgagcgcgccctactacagctcctggggcactctggagtatcacaacgccatggtggtgggaacggaagaggcggaggatggctcggcgggtgtccgtgtgctttacctgtaccccactcacaagtctctgaagccgtgcccgttcttcctggagggaaagtgccgctttaaggagaactgcaggttctcccatgggcaggtggtctctctggatgagctgcgccccttccaggacccagacctgagctccctgcaggccggctctgcgtgtctggccaagcaccaggatggcctctggcacgcagcacgcatcaccgatgtggacaacggctactacacagtcaagtttgactcgctgctgctgagggaggccgtggtggagggggacggcatcctgcccccactgcgcacagaggccacagagtccgactcagacagcgacggtacgggtgactccagctatgccagagtggtggggtcagatgctgtggactctgggacctgcagctctgcctttgctggctgggaggtgcacacgcgaggtataggctccagactcctcaccaagatgggctatgagtttggcaagggtttgggccgacacgcggaaggccgggtggagcccatccatgctgtggtgttgcctcgagggaagtcgctggaccagtgtgtggagaccctgcagaagcagaccagggttggcaaggctggcaccaacaagccccccaggtgccggggaagaggggccaggcctgggggccgcccagctcctcggaatgtgtttgacttcctcaatgaaaagctgcaaggtcaggctcctggggccctagaagccggggcggccccagcggggaggaggagcaaggacatgtaccatgccagcaagagtgccaagcgggccctgagcctgcggctcttccagactgaggagaagatcgagcgaacccagcgggacatcaggagcatccaggaggctctcgcccgcaacgctggccggcatagcgtggcgtcagcccagctgcaggagaagctggcaggagcccagcgccagctggggcagctccgggctcaggaagccggcctgcagcaggagcagaggaaggcagacacccacaagaagatgactgagttctag

SEQ ID NO: 5870 - protein, 511 aa, Homo sapiens
MDEESLESALQTYRAQLQQVELALGAGLDSSEQADLRQLQGDLKELIELTEASLVSVRKSSLLAALDEERPGRQEDAEYQAFREAITEAVEAPAAARGSGSETVPKAEAGPESAAGGQEEEEGEDEEELSGTKVSAPYYSSWGTLEYHNAMVVGTEEAEDGSAGVRVLYLYPTHKSLKPCPFFLEGKCRFKENCRFSHGQVVSLDELRPFQDPDLSSLQAGSACLAKHQDGLWHAARITDVDNGYYTVKFDSLLLREAVVEGDGILPPLRTEATESDSDSDGTGDSSYARVVGSDAVDSGTCSSAFAGWEVHTRGIGSRLLTKMGYEFGKGLGRHAEGRVEPIHAVVLPRGKSLDQCVETLQKQTRVGKAGTNKPPRCRGRGARPGGRPAPRNVFDFLNEKLQGQAPGALEAGAAPAGRRSKDMYHASKSAKRALSLRLFQTEEKIERTQRDIRSIQEALARNAGRHSVASAQLQEKLAGAQRQLGQLRAQEAGLQQEQRKADTHKKMTEF

SEQ ID NO: 5871 - DNA, 5205 bp, Homo sapiens
cgctgccggtgccgcacccgcgccctctgccgccgccgccgccgccgcccggggtctccaggctgaggagtgcgtcggccgctgcccagcagcgccgcgaatcggggagcggagccgcggagccggcgggagggcgggcgggcgggcggacgggcagaatagcctaacatggcagaccagagacagcgctcactgtctacctctggggagtcattgtaccacgtccttgggttggacaagaacgcaacctcagatgacattaaaaagtcctatcggaagcttgccttgaaatatcaccccgacaagaaccccgacaacccggaggccgcggacaagtttaaggagatcaacaacgcgcacgccatcctcacggacgccacaaaaaggaacatctacgacaagtacggctcgctgggtctctacgtggccgagcagtttggggaagagaacgtgaacacctacttcgtgctgtccagctggtgggccaaggccctgtttgtcttctgcggcctcctcacgtgctgctactgctgctgctgtctgtgctgctgcttcaactgctgctgcgggaagtgtaagcccaaggcgcctgaaggcgaggagacggagttctacgtgtcccccgaggatctggaggcacagctgcagtctgacgagagggaggccacagacacgccgatcgtcatacagccggcatccgccaccgagaccacccagctcacagccgactcccaccccagctaccacactgacgggttcaactaaatccaggaggagctgtggtcagaggaggagccggcgcctggccacgccaaccttagaatcatgaactgtagtcacagagatgggaaggcagcctcctgcctgccctggccttgctggggcccctcctgcctccacgcccacccagcgtcgacccttgacccacgaagtgcgtagcatgcagtatttaaagcagtgtagctacggtcttctgtttttttcccttttttaatagcatgtatggggttctgttccatgtctgtgttgtggacattccgcggcatgaccgcgtgaactgcacggtggagctgcctcagggctgtcggtcaggttggtccagtgaggggtgactgcagccggtcaggtgggcgaggagaaggggggctgcccctttcctacctgtgcttgaggggccggaggcaggtgctgcctggcagagctgtgttaccgtcttggcctcggggtctggtccacactctgtgctcccagccttgaggctgcagtaggactctgatctcacctgccagaagagaggcggggccgcgtcctcctggcgtcaccggcgtcactgtcattccttggtgtctgtgctgggcatggttggcttgggggtctgtggtttcctgggccttgtggcagggtttctcccgtgggagaatttggtgtggaaagcataggaggccccttccgaggttgacaccgtgtcctccgcggtgtttctcgcctggtcgtctcgtcgtgtggacgctgccgttctggttctcggaggtgtgtccttcgccgtgttggggttatttgtctgtgttcctgcacttttcccgggctctgagctggattgatggggccagtctcccccctcccatcttgaggtcgttctccacattccttccagcacacctgtcctttccatagccctttttggacctttagaaccacagatgataggaccagcccaatgagccacagtcagagagtagattgtgcatgtgtgagcacccagctactggggacgggggctctcccacgacccctcctcctgtgtttgccagagctcccatctgccccactcgcctttgccccgtcatcgatgattcaggcagagccagattcgttaggtccctggaggaaggactgactggaccagagggaccctctggctcaggagggttgggtccctgggaggccggcagccaggccacagaatccacacgtggaccattgtgggtccctgggaggccggcagccaggccacggaatccacacgtggaccattgtgggtcccttgggaggccagcagccagactacggaatccacatgtggaccatgggaagtcagtctcttgcgtgtcctagaccttgtgggtggcgccctgcataggggagcagggggaacgggtctgatgtccctgtgctggctgagggctcagagctgcccgcactccgtagctcatgggatgtgctgggcctgcctttggcgccatgctgcagactccagtgggcctggtttctgcagaatgtccatggtggccgctgcagagttgcagaggtccctgtagagataaagctgaggaggaggctgtgtgtgatggctctggctcggaccaaccagatgagcctcctgaagcccccttccctgcctgcctgctgacccgtggccccagctcactcattgccctcagcagccacccgaggctgtgcagaagggtaggttcaggttgaccaggaagctgccaaaagggacatggatatgaggatacatctggacgtgcttaggaacagggtgctggttgagggcccccagctgacccctactgcagatccgcatgtggaccatgagccggctgccagcactaggtcctgggcagctttgtttgtcccacttttctttgtttcttctcactaaaatgatcacgaagacctttgacaagaggagagatatgcactgtgatattaaattagaaataatttatcaaaatcagacctctcctaaaagaataagaaattcattgtttggcccatcctgaaaggtgaggtggcgagacagtggggtgcctccgtgccgcttcgtgcagcagcaagttcagcctgagatgctggctgtactcagcctttgcaatttttgtagatgtagcttaggacgtgagttatttttccgcagactggccaagagccaggttctaagcttggacctaaggtagaaagctgcccatcgggggccctagctcagccccaccaggccctctgttgggcctgcacacagctctgtggctagaacactccaaggcccttcggtacccatcagagtgggccccttgccaggtggcttttcagttacagagtccagtggaccattttgtagaaccatgcagctccctgcggaaggtggggtagggtgggaaagaggagcaggtctggaggtttgtggaacccagtcccctgcagaatctgtaaaacctaataaatcatggttgtggccattctcacggtggtgattgtgattagacgacccccgggaagcccagacactcggggcctggagttcctccccctgcctgacctagaagcagaaccgttttcagcgctctgccctgttggctttaaggctttgtcttaatttaaggaaaaagatcctcccgggttttatttctctctttcttgagtggactgtttccctataattaaaagaggtggtgagtcctggggcagcttccgcgcctccctgtccacgtgctaacagatcaggacgcccccagcacccctgcctgcttttgctggtggcagtgacgggaccccgactcctcactctcgggccgcagacaatgctgtgagcaagtgtggccatgggcacagaatgtccctttggacgccgctgctgggggctgccaggggccctctggggtcgtgctttgaggcccgtccggttcacgagggggtccgggcagcactgactgcttccgacctgcaggaggcgtaggagcggccctgcgggccctttcacggcagctgctgctgtatagatttgtctccactcagtgacgtgggatttttttgtcttccttttggctttatttttaaactgctttagatattactgctcagtgtttgtgaactttcctagttctctatgttgttagtgcagccagcacccagtggggacctactagaaaaaggaactggcatgcacacgtgcccagcaggaaaagcttcgtcttcacgtcggctgctgccatccagaagaggccctggagcctcacgccgtcgaggctgctctcaggcgttctgttccgggcgaggcttgtgctgcaaggaagggcaccagcatgcaggctgccactggagggtccgggtgctgcgggcagagttcagcgcttgtccaccctcccttagctctgactcagtgcatcctactgtggggacatctcgtgaggggacacgaaatgactgatctcaccctttcccagtattcagagctgtgaacccctgtggcgcaggactggcctgtgtctgttattttggttgtaaatcattctcctgtggaattggcaaaagctacatttttactgtccttaccagcaacagtttgcgtcgtcacatgctgtgagtgtgggctgtggtgtgtccgtgtgtgtacatatgtgtatatgtatatatcacgcagcaggagtgtcattcatgctgctgtcccctggtgaagtgacaagtacaattaaaggtggctctgaaatggcctctggtttcttgggagtcgggcagggacctgcaggaggctttcccagcaggtgcacagaaggaagcgctgagcccactgtgtgcagagggtgtgtgcccagggcactgccacggcccccaccagcattggcctctgctctgcagggtggggtgcccatcctgggggctgtgtgtcatgctcacctgacccaggtgtgtgtcccggtgtgaaatcgaggaggggactggaagcccttccctgccttgaaacatgaaagctgattttctgagcagcagatacggtcagtggcaaagctgcatctgaagggcggcctgggaaggggccctgtgctggccccgggtccgccccagaggagtccacacagcaccacctccagaaggggctgggcccggggtcctgcaggcggcaccttttggtagagtttgtttccctggaaaatggggaaaatgtttcaagccaggtgaggggggaagttaacactgaaatatgtattgtttttaaaaatcaaatgcacacgcatggaagctgcttgtccatgcactggttttgtcactggcgtcctggaatccgaccgtgttggggtgcaggcgctgtcagactccggctgatcctggctcgagcacacacatctaagggccaggctggttccgcatggtgatctccgtcttgtatgtctgaatgttggcctaaaataaagattactgttgtaaaat

SEQ ID NO: 5872 - protein, 198 aa, Homo sapiens
MADQRQRSLSTSGESLYHVLGLDKNATSDDIKKSYRKLALKYHPDKNPDNPEAADKFKEINNAHAILTDATKRNIYDKYGSLGLYVAEQFGEENVNTYFVLSSWWAKALFVFCGLLTCCYCCCCLCCCFNCCCGKCKPKAPEGEETEFYVSPEDLEAQLQSDEREATDTPIVIQPASATETTQLTADSHPSYHTDGFN

SEQ ID NO: 5873 - DNA, 3060 bp, Homo sapiens
ctacggagtgcatcggacgtcgaagcctagagtctctgcgtctttccctcttccgctgcctcattcctttccttcctagccttggtcgtcgccgccaccatgaacaagaagaagaaaccgttcctagggatgcccgcgcccctcggctacgtgccgtggctgggccggggcgccactggcttcaccacgcggtcagacattgggcccgcccgtgatgcaaatgaccctgtggatgatcgccatgcacccccaggcaagagaaccgttggggaccagatgaagaaaaatcaggctgctgacgatgacgacgaggatctaaatgacaccaattacgatgagtttaatggctatgctgggagcctcttctcaagtggaccctacgagaaagatgatgaggaagcagatgctatctatgcagccctggataaaaggatggatgaaagaagaaaagaaagacgggagcaaagggagaaagaagaaatagagaaatatcgtatggaacgccccaaaatccaacagcagttctcagacctcaagaggaagttggcagaagtcacagaagaagagtggctgagcatccccgaggttggcgatgccagaaataaacgtcagcggaacccacgctatgagaagctgacccctgttcctgacagtttctttgccaaacatttacagaccggagagaaccatacctcagtggatccccgacaaactcaatttggaggtcttaacacaccctatccaggtggactaaacactccataccgaggtggaatgacgccaggactgatgacacctggcacaggtgagctggacatgaggaagattggccaagcgaggaacactctgatggacatgaggctgagccaggtgtctgactccgtgagtggacagaccgtcgttgaccccaaaggctacctgacggatttaaattccatgatcccgacacacggaggagacatcaatgatatcaagaaggcgcgactgctcctcaagtctgttcgggagacgaaccctcatcacccgccagcctggattgcatcagcccgcctggaagaagtcactgggaagctacaagtagctcggaaccttatcatgaaggggacggagatgtgccccaagagtgaagatgtctggctggaagcagccaggttgcagcctggggacacagccaaggccgtggtagcccaagctgtccgtcatctcccacagtctgtcaggatttacatcagagccgcagagctggaaacggacattcgtgcaaagaagcgggttcttcggaaagccctcgagcatgttccaaactcggttcgcttgtggaaagcagccgttgagctggaagaacctgaagatgctagaatcatgctgagccgagctgtggagtgctgccccaccagcgtggagctctggcttgctctggcaaggctggagacctatgaaaatgcccgcaaggtcttgaacaaggcgcgggagaacattcctacagaccgacatatctggatcacggctgctaagctggaggaagccaatgggaacacgcagatggtggagaagatcatcgaccgagccatcacctcgctgcgggccaacggtgtggagatcaaccgtgagcagtggatccaggatgccgaggaatgtgacagggctgggagtgtggccacctgccaggccgtcatgcgtgccgtgattgggattgggattgaggaggaagatcggaagcatacctggatggaggatgctgacagttgtgtagcccacaatgccctggagtgtgcacgagccatctacgcctacgccctgcaggtgttccccagcaagaagagtgtgtggctgcgcgccgcgtacttcgagaagaaccatggcactcgggagtccctggaagcactcctgcagagggctgtggcccactgccccaaagcagaggtgctgtggctcatgggcgccaagtccaagtggctggcaggggatgtgcctgcagcaaggagcatcctggccctggccttccaggccaaccccaacagtgaggagatctggctggcagccgtgaagctggagtccgagaatgatgagtacgagcgggcccggaggctgctggccaaggcgcggagcagtgcccccaccgcccgggtgttcatgaagtctgtgaagctggagtgggtgcaagacaacatcagggcagcccaagatctgtgcgaggaggccctgcggcactatgaggacttccccaagctgtggatgatgaaggggcagatcgaggagcagaaggagatgatggagaaggcgcgggaagcctataaccaggggttgaagaagtgtccccactccacacccctgtggcttttgctctctcggctggaggagaagattgggcagcttactcgagcacgggccattttggaaaagtctcgtctgaagaacccaaagaaccctgggctgtggttggagtccgtgcggctggagtaccgtgcggggctgaagaacatcgcaaatacactcatggccaaggcgctgcaggagtgccccaactccggtatcctgtggtctgaggccatcttcctcgaggcaaggccccagaggaggaccaagagcgtggatgccctgaagaagtgtgagcatgacccccatgtgctcctggccgtggccaagctgttttggagtcagcggaagatcaccaaggccagggagtggttccaccgcactgtgaagattgactcggacctgggggatgcctgggccttcttctacaagtttgagctgcagcatggcactgaggagcagcaggaggaggtgaggaagcgctgtgagagtgcagagcctcggcatggggagctgtggtgcgccgtgtccaaggacatcgccaactggcagaagaagatcggggacatccttaggctggtggccggccgcatcaagaacaccttctgattgagcggttgccatggccggtctccgtggggcagggttgggccgcatgtggaagggctctgagctgtgtcctccttcattaaaagtttttatgtctcgtgtcaaaaaaaaaaaaaaaaaaaaagaaaaaaaaaa

SEQ ID NO: 5874 - protein, 941 aa, Homo sapiens
MNKKKKPFLGMPAPLGYVPWLGRGATGFTTRSDIGPARDANDPVDDRHAPPGKRTVGDQMKKNQAADDDDEDLNDTNYDEFNGYAGSLFSSGPYEKDDEEADAIYAALDKRMDERRKERREQREKEEIEKYRMERPKIQQQFSDLKRKLAEVTEEEWLSIPEVGDARNKRQRNPRYEKLTPVPDSFFAKHLQTGENHTSVDPRQTQFGGLNTPYPGGLNTPYRGGMTPGLMTPGTGELDMRKIGQARNTLMDMRLSQVSDSVSGQTVVDPKGYLTDLNSMIPTHGGDINDIKKARLLLKSVRETNPHHPPAWIASARLEEVTGKLQVARNLIMKGTEMCPKSEDVWLEAARLQPGDTAKAVVAQAVRHLPQSVRIYIRAAELETDIRAKKRVLRKALEHVPNSVRLWKAAVELEEPEDARIMLSRAVECCPTSVELWLALARLETYENARKVLNKARENIPTDRHIWITAAKLEEANGNTQMVEKIIDRAITSLRANGVEINREQWIQDAEECDRAGSVATCQAVMRAVIGIGIEEEDRKHTWMEDADSCVAHNALECARAIYAYALQVFPSKKSVWLRAAYFEKNHGTRESLEALLQRAVAHCPKAEVLWLMGAKSKWLAGDVPAARSILALAFQANPNSEEIWLAAVKLESENDEYERARRLLAKARSSAPTARVFMKSVKLEWVQDNIRAAQDLCEEALRHYEDFPKLWMMKGQIEEQKEMMEKAREAYNQGLKKCPHSTPLWLLLSRLEEKIGQLTRARAILEKSRLKNPKNPGLWLESVRLEYRAGLKNIANTLMAKALQECPNSGILWSEAIFLEARPQRRTKSVDALKKCEHDPHVLLAVAKLFWSQRKITKAREWFHRTVKIDSDLGDAWAFFYKFELQHGTEEQQEEVRKRCESAEPRHGELWCAVSKDIANWQKKIGDILRLVAGRIKNTF

SEQ ID NO: 5875 - DNA, 1528 bp, Homo sapiens
aagtcccggcccctggctttggggaagtgccgccgaggcgcctgcgcactgcgcccccgcgccccctccccgactgtcgggccggaccttggagcgcgcgggccggcggcggcgcgagtggctcgggagcgcggctgacccccaggctgtggtgagggtctgagagctggtaccacggagcctgggcaacctcctccgcccacccatgcccaccccgcatgaggctgagaagcagatcacagggccagaggaggcggaccggcccccttcaatgtccagtcatgatacagcctctccagcggcccccagccgcaacccctgctgcctgtgctggtgctgctgctgtagctgctcctggaaccaagagcggcggcgcgcgtggcaggcctcccgggagagcaagctgcagcccctccccagctgtgaagtatgtgccacgccaagtcctgaggaggtgcagagctgggcgcagtcttttgacaagctgatgcacagcccagcgggacgcagcgtgttccgggcgttcctgcggacagagtacagcgaggagaacatgctcttctggttggcctgcgaggagctgaaggccgaggccaaccagcatgtggtagacgagaaggcgaggctcatctacgaggactacgtatccatcctgtcccccaaggaggtgagcctggactcccgtgtgcgggagggcatcaacaagaagatgcaggagccgtccgcacacacgttcgacgacgcgcagctgcagatctacacgctcatgcaccgggactcctacccccgcttcctcagctctcccacctaccgtgccctgctgctgcaggggccatcacagtcctcctccgaggcctaggccgcccccagcagcacagaccccgccgcctcctacggccgactctgggttcccttcaggtgttgttgtcggcagggctgtcagggcacatgcctggccggctggggtccccacccgcggagacggtcctagacccagtggggagtgctgtgtctcctgggtctgcccacccgtggccaagcaggaactccaggtgcagggcgggcctccaggtgcagggcgggccagaagccccctcatcggcccgcagctggctggcccagtgctcctggctgggggctcttgcgtggtgagagtaggggtccccccaggagccatgctggacccatgagcctcgctggggcctcctccccaggcagccaatgggccccagacaagcctttggtggggaacagaacctccgcatcgtgtagttttgtgacataaggagacctcctacttgagctgtctgtaccccagaatcaaacacagaacctcagaaccagatttaggacctcagaatcctgcactcaaggtggcaggacccaatttctgttttatatgttcatgaactttaaacctggaaacatgtccttactaggtgttttatcaaaaaaaagttttcatatttatctctatccctaaccccccaaaaataggatgtcttattattgaagatatttttaaagc

SEQ ID NO: 5876 - DNA, 628 bp, Homo sapiens
ggaaaaccgtgtactattagccatggtcaaccccaccgtgttcttcgacattgccgtcgacggcgagcccttgggccgcgtctcctttgagctgtttgcagacaaggtcccaaagacagcaggctttcacagaattattccagggtttatgtgtcagggtggtgacttcacacgccataatggcactggtggcaagtccatctatggggagaaatttgaagatgagaacttcatcctaaagcatacaggtcctggcatcttgtccatggcaaatgctggacccaacacaaatggatcccagtttttcatctgcactgccaagactgagtggttggatggcaagcatgtggtgtttggcaaagtgaaagaaggcatgaatattgtggaggccatggagcgctttgggtccaggaatggcaagaccagcaagaagatcaccattgctgactgtggacaactcgaataagtttgacttgtgttttatcttaaccaccaggtcattccttctgtagctcaggagagcacccctccaccccatttgctcgcagtatcctagaatctttgtgctctcgctgcagttccctttgggttccatgttttccttgttccctcccatgcctagctggat

SEQ ID NO: 5877 - DNA, 543 bp, Homo sapiens
gctcgatggtcgaggccatctcctggtccgcctggcggccatcgtggctaaacagaacaagttgaagtacctgggtttcctccgcaagcggatgaacacccacctttcccgaggtccctaccacttccgggccccccagccgcatcttctggcggaccgtgcgaggtatgccgccccacaagaccaagcgaggccaggcttctctggaccgcctcaaggtgtttgaccgcatcccaccgccctacgacaagaaaaagcggatggtgttcctgctccctcaaggttgtgcgtctgaagcctacaagaaagtttgcctatctggggcgcctggctcacgaggttggctggaagtaccaggcagtgacagccaccctggaggagaagaggaaagagaaagccaagatccactaccggaagaagaaacagctcatgaggctacggaaacaggccgagaagaacatggagaagaaaattgacaaatacacagaggtcctcaagacccacagactcctggtctgagcccaataaagactgttaattcct

SEQ ID NO: 5878 - DNA, 744 bp, Homo sapiens
gcatcccaccgccctacgacaagaaaaagcggatggtgttcctgctccctcaaggttgtgcgtctgaagcctacaagaaagtttgcctatctggggcgcctggctcacgaggttggctggaagtaccaggcagtgacagccaccctggaggagaagaggaaagagaaagccaagatccactaccggaagaagaaacagctcatgaggctacggaaacaggccgagaagaacatggagaagaaatgagcccaataaagactgttaattcctcatgcgtggcctgcccttcctccatcgtcgccctggaatgtacgggacccaggggcagcagcagtccaggcgccacaggcagcctcggacacaggaagctgggagcaaggaaagggtcttagtcactgcctcccgaagttgcttgaaagcactcggagaactgtgcaggtgtcatttatctatgaccaataggaagagcaaccagttactattagtgaaagggagccagaagactgattggagggccctatcttgtgagcggggcgtctgttggactttccacctggtcatatactctgcagctgttagaatgtgcaaggacttggggacagtatgagcttgctgttgtacacagggtatttctagaagcagaaatagactgggaagatgcacaaccaaggggttacaggcatcgcccgtgctcacctgtattttgtaatcagaaataaattgcttttaaagaaaaaaataaaa

SEQ ID NO: 5879 - DNA, 1721 bp, Homo sapiens
acgaggggaagaaaggagttggggcaaaacaggaggcgtttccctacccgcatacatccccgtccccgagacacccaatccccccacccccagcctgcccgcgcctcccgcccccagctcctcgccctggggacagctggcagccccgcgcggaccagacacaaagccgatcaatcccggaggcgtgggggcggagggacgacccgccggggctttcccgggcgctgctctcctcctgctgccccctcgctaggacccggcggacgcctcgtctggttttcacgccctctagcccctacccccacacccccaaaacagaacagacccccatccctgggctggaggacccgcctcttggcagccagctgagaaggcgccccggggagggggaaactgacatcccatctagagccgtccctcctcttcctcccctcccgactctctgctcctttcccgccccagaagttcaagggcccccggcctcctgcgctcctgccgccgggaccctcgacctcctcagagcagccggctgccgccccgggaagatggcgaggaggagccgccaccgcctcctcctgctgctgctgcgctacctggtggtcgccctgggctatcataaggcctatgggttttctgccccaaaagaccaacaagtagtcacagcagtagagtaccaagaggctattttagcctgcaaaaccccaaagaagactgtttcctccagattagagtggaagaaactgggtcggagtgtctcctttgtctactatcaacagactcttcaaggtgattttaaaaatcgagctgagatgatagatttcaatatccggatcaaaaatgtgacaagaagtgatgcggggaaatatcgttgtgaagttagtgccccatctgagcaaggccaaaacctggaagaggatacagtcactctggaagtattagtggctccagcagttccatcatgtgaagtaccctcttctgctctgagtggaactgtggtagagctacgatgtcaagacaaagaagggaatccagctcctgaatacacatggtttaaggatggcatccgtttgctagaaaatcccagacttggctcccaaagcaccaacagctcatacacaatgaatacaaaaactggaactctgcaatttaatactgtttccaaactggacactggagaatattcctgtgaagcccgcaattctgttggatatcgcaggtgtcctgggaaacgaatgcaagtagatgatctcaacataagtggcatcatagcagccgtagtagttgtggccttagtgatttccgtttgtggccttggtgtatgctatgctcagaggaaaggctacttttcaaaagaaacctccttccagaagagtaattcttcatctaaagccacgacaatgagtgaaaatgatttcaagcacacaaaatcctttataatttaaagactccactttagagatacaccaaagccaccgttgttacacaagttattaaactattataaaactctgctttgtccgacatttgcaaagaggtacacgaggaaatggaattggtatttcattttaattttcatgactactaactcacctgaacttgctattttaaacaaatagttctgtcgacacctaaaatataatctggcttcttgtgtctggactaagttaaaagaattaaaatactttgtaatgtcaaaaaaaaaaaaaaaaaaaaaaaaaaaa

SEQ ID NO: 5880 - protein, 298 aa, Homo sapiens
MARRSRHRLLLLLLRYLVVALGYHKAYGFSAPKDQQVVTAVEYQEAILACKTPKKTVSSRLEWKKLGRSVSFVYYQQTLQGDFKNRAEMIDFNIRIKNVTRSDAGKYRCEVSAPSEQGQNLEEDTVTLEVLVAPAVPSCEVPSSALSGTVVELRCQDKEGNPAPEYTWFKDGIRLLENPRLGSQSTNSSYTMNTKTGTLQFNTVSKLDTGEYSCEARNSVGYRRCPGKRMQVDDLNISGIIAAVVVVALVISVCGLGVCYAQRKGYFSKETSFQKSNSSSKATTMSENDFKHTKSFII

SEQ ID NO: 5881 - DNA, 3579 bp, Mus musculus
agtttcctcggcagcggtaggcgagagcacgcggaggagcgtgcgcgggggccccgggagacggcggcggtggcggcgcgggcagagcaaggacgcggcggatcccactcgcacagcagcgcactcggtgccccgcgcagggtcgcgatgctgcccggtttggcactgctcctgctggccgcctggacggctcgggcgctggaggtacccactgatggtaatgctggcctgctggctgaaccccagattgccatgttctgtggcagactgaacatgcacatgaatgtccagaatgggaagtgggattcagatccatcagggaccaaaacctgcattgataccaaggaaggcatcctgcagtattgccaagaagtctaccctgaactgcagatcaccaatgtggtagaagccaaccaaccagtgaccatccagaactggtgcaagcggggccgcaagcagtgcaagacccatccccactttgtgattccctaccgctgcttagttggtgagtttgtaagtgatgcccttctcgttcctgacaagtgcaaattcttacaccaggagaggatggatgtttgcgaaactcatcttcactggcacaccgtcgccaaagagacatgcagtgagaagagtaccaacttgcatgactacggcatgttgctgccctgcggaattgacaagttccgaggggtagagtttgtgtgttgcccactggctgaagaaagtgacaatgtggattctgctgatgcggaggaggatgactcggatgtctggtggggcggagcagacacagactatgcagatgggagtgaagacaaagtagtagaagtagcagaggaggaagaagtggctgaggtggaagaagaagaagccgatgatgacgaggacgatgaggatggtgatgaggtagaggaagaggctgaggaaccctacgaagaagccacagagagaaccaccagcattgccaccaccaccaccaccaccacagagtctgtggaagaggtggttcgagaggtgtgctctgaacaagccgagacggggccgtgccgagcaatgatctcccgctggtactttgatgtgactgaagggaagtgtgccccattcttttacggcggatgtggcggcaaccggaacaactttgacacagaagagtactgcatggccgtgtgtggcagcgccatgtcccaaagtttactcaagactacccaggaacctcttgcccgagatcctgttaaacttcctacaacagcagccagtacccctgatgccgttgacaagtatctcgagacacctggggatgagaatgaacatgcccatttccagaaagccaaagagaggcttgaggccaagcaccgagagagaatgtcccaggtcatgagagaatgggaagaggcagaacgtcaagcaaagaacttgcctaaagctgataagaaggcagttatccagcatttccaggagaaagtggaatctttggaacaggaagcagccaacgagagacagcagctggtggagacacacatggccagagtggaagccatgctcaatgaccgccgccgcctggccctggagaactacatcaccgctctgcaggctgttcctcctcggcctcgtcacgtgttcaatatgctaaagaagtatgtccgcgcagaacagaaggacagacagcacaccctaaagcatttcgagcatgtgcgcatggtggatcccaagaaagccgctcagatccggtcccaggttatgacacacctccgtgtgatttatgagcgcatgaatcagtctctctccctgctctacaacgtgcctgcagtggccgaggagattcaggatgaagttgatgagctgcttcagaaagagcaaaactattcagatgacgtcttggccaacatgattagtgaaccaaggatcagttacggaaacgatgctctcatgccatctttgaccgaaacgaaaaccaccgtggagctccttcccgtgaatggagagttcagcctggacgatctccagccgtggcattcttttggggctgactctgtgccagccaacacagaaaacgaagttgagcctgttgatgcccgccctgctgccgaccgaggactgaccactcgaccaggttctgggttgacaaatatcaagacggaggagatctctgaagtgaagatggatgcagaattccgacatgactcaggatatgaagttcatcatcaaaaattggtgttctttgcagaagatgtgggttcaaacaaaggtgcaatcattggactcatggtgggcggtgttgtcatagcgacagtgatcgtcatcaccttggtgatgctgaagaagaaacagtacacatccattcatcatggtgtggtggaggttgacgccgctgtcaccccagaggagcgccacctgtccaagatgcagcagaacggctacgaaaatccaacctacaagttctttgagcagatgcagaactagacccccgccacagcagcctctgaagttggacagcaaaaccattgcttcactacccatcggtgtccatttatagaataatgtgggaagaaacaaacccgttttatgatttactcattatcgccttttgacagctgtgctgtaacacaagtagatgcctgaacttgaattaatccacacatcagtaatgtattctatctctctttacattttggtctctatactacattattaatgggttttgtgtactgtaaagaatttagctgtatcaaactagtgcatgaatagattctctcctgattatttatcacatagccccttagccagttgtatattattcttgtggtttgtgacccaattaagtcctactttacatatgctttaagaatcgatgggggatgcttcatgtgaacgtgggagttcagctgcttctcttgcctaagtattcctttcctgatcactatgcattttaaagttaaacatttttaagtatttcagatgctttagagagattttttttccatgactgcattttactgtacagattgctgcttctgctatatttgtgatataggaattaagaggatacacacgtttgtttcttcgtgcctgttttatgtgcacacattaggcattgagacttcaagcttttctttttttgtccacgtatctttgggtctttgataaagaaaagaatccctgttcattgtaagcacttttacggggcgggtggggaggggtgctctgctggtcttcaattaccaagaattctccaaaacaattttctgcaggatgattgtacagaatcattgcttatgacatgatcgctttctacactgtattacataaataaattaaataaaataaccccgggcaagacttttctttgaaggatgactacagacattaaataatcgaagtaattttgggtggggagaagaggcagattcaattttctttaaccagtctgaagtttcatttatgatacaaaagaagatgaaaatggaagtggcaatataaggggatgaggaaggcatgcctggacaaacccttcttttaagatgtgtcttcaatttgtataaaatggtgttttcatgtaaataaatacattcttggaggagc

SEQ ID NO: 5882 - protein, 770 aa, Mus musculus
MLPGLALLLLAAWTARALEVPTDGNAGLLAEPQIAMFCGRLNMHMNVQNGKWDSDPSGTKTCIDTKEGILQYCQEVYPELQITNVVEANQPVTIQNWCKRGRKQCKTHPHFVIPYRCLVGEFVSDALLVPDKCKFLHQERMDVCETHLHWHTVAKETCSEKSTNLHDYGMLLPCGIDKFRGVEFVCCPLAEESDNVDSADAEEDDSDVWWGGADTDYADGSEDKVVEVAEEEEVAEVEEEEADDDEDDEDGDEVEEEAEEPYEEATERTTSIATTTTTTTESVEEVVREVCSEQAETGPCRAMISRWYFDVTEGKCAPFFYGGCGGNRNNFDTEEYCMAVCGSAMSQSLLKTTQEPLARDPVKLPTTAASTPDAVDKYLETPGDENEHAHFQKAKERLEAKHRERMSQVMREWEEAERQAKNLPKADKKAVIQHFQEKVESLEQEAANERQQLVETHMARVEAMLNDRRRLALENYITALQAVPPRPRHVFNMLKKYVRAEQKDRQHTLKHFEHVRMVDPKKAAQIRSQVMTHLRVIYERMNQSLSLLYNVPAVAEEIQDEVDELLQKEQNYSDDVLANMISEPRISYGNDALMPSLTETKTTVELLPVNGEFSLDDLQPWHSFGADSVPANTENEVEPVDARPAADRGLTTRPGSGLTNIKTEEISEVKMDAEFRHDSGYEVHHQKLVFFAEDVGSNKGAIIGLMVGGVVIATVIVITLVMLKKKQYTSIHHGVVEVDAAVTPEERHLSKMQQNGYENPTYKFFEQMQN

SEQ ID NO: 5883 - DNA, 1729 bp, Homo sapiens
gcatgcttttttttttttccggtaggtcgccagctgaggcggtttgtaagttttgggtcgcagtatgctagaattttgaggctcccttctgatgaaaattgagctgtccatgcagccatggaacccgggttacagcagtgagggggccacggctcaagaaacttacacatgtccaaaaatgattgagatggagcaggcggaggcccagcttgctgagttagacctgctagccagtatgttccctggtgagaatgagctcatagtgaatgaccagctggctgtagcagaactgaaagattgtattgaaaagaagacaatggaggggcgatcttcaaaagtctactttactatcaatatgaacctggatgtatctgacgaaaaaatggcgatgttttctctggcctgtattcttccctttaaatacccggcagttctgcctgaaattactgtcagatcagtattattgagtagatcccagcagactcagctgaacacagatctgactgcattcctgcaaaaacattgtcatggagatgtttgtatactgaatgccacagagtgggttagagaacacgcctctggctatgtcagcagagatacttcatcttcacccaccacaggaagcacagtccagtcagttgacctcatcttcacgagactctggatctacagccatcatatctataacaaatgcaaaagaaagaatattctagagtgggcaaaggagctttccctgtctgggtttagcatgcctggaaaacctggtgttgtttgtgtggaaggcccacaaagtgcctgtgaagaattctggtcaagactcagaaaattaaactggaagagaattttaattcgccatcgagaagacattccttttgatggtacaaatgatgaaacggaaagacaaaggaaattttccatttttgaagaaaaagtgttcagtgttaatggagccaggggaaaccacatggactttggtcagctctatcagttcttaaacaccaaaggatgtggggatgttttccagatgttctttggtgtagaaggacaatgacatcaagagtagttgaaagtatcttgccactgttggccttttgatttttttttcccactttttcttgaaagattaagtaattttattttagttccattctagaatgttggggagtggggcacaagaaaaaatagtatagctgaaatgcatctgttaaaaatgtcatgattgaaagcagaactgagtttcaaattacaaccttaaaattgttgttagatatttcttcacatatcagctgcccattttgaaaaagaaattatccataaaggtaatgttggtgctccaatttgccagccattcccaacccccttctcccttacctgccttcactaaagaacccagaaaagctaattgctcccctttcagcctctgttgcaactaacaactctcagtggcctcaggacacagctttggccttgggaattctgggaaaacttttacttcctgattaaagatacatatgcagctaggccacctcctcccccccttactgccataaacaccaaagtgatgactggagctggaggagttatttgaaccacgacggaagggccaagagagccacgaagatgccagttgccacattgttgagctgctgacccaacaccagccattgcctgtctctaaacatcttatgaaataaaaccagttttgtttaaaaaaaaaaaaaaaaaaaaa

SEQ ID NO: 5884 - protein, 319 aa, Homo sapiens
MKIELSMQPWNPGYSSEGATAQETYTCPKMIEMEQAEAQLAELDLLASMFPGENELIVNDQLAVAELKDCIEKKTMEGRSSKVYFTINMNLDVSDEKMAMFSLACILPFKYPAVLPEITVRSVLLSRSQQTQLNTDLTAFLQKHCHGDVCILNATEWVREHASGYVSRDTSSSPTTGSTVQSVDLIFTRLWIYSHHIYNKCKRKNILEWAKELSLSGFSMPGKPGVVCVEGPQSACEEFWSRLRKLNWKRILIRHREDIPFDGTNDETERQRKFSIFEEKVFSVNGARGNHMDFGQLYQFLNTKGCGDVFQMFFGVEGQ

SEQ ID NO: 5885 - DNA, 1821 bp, Homo sapiens
cgcgtgaactgcttcctgcaggctggccatggcgcttcacgttcccaaggctccgggctttgcccagatgctcaaggagggagcgaaacacttttcaggattagaagaggctgtgtatagaaacatacaagcttgcaaggagcttgcccaaaccactcgtacagcatatggaccaaaaggaatgaacaaaatggttatcaaccacttggagaagttgtttgtgacaaacgatgcagcaactattttaagagaactagaagtacagcatcctgctgcaaaaatgattgtaatggcttctcatatgcaagagcaagaagttggagatggcacaaactttgttctggtatttgctggagctctcctggaattagctgaagaacttctgaggattggcctgtcagtttcagaggtcatagaaggttatgaaatagcctgcagaaaagctcatgagattcttcctaatttggtatgttgttctgcaaaaaaccttcgagatattgatgaagtctcatctctacttcgtacctccataatgagtaaacaatatggtaatgaagtatttctggccaagcttattgctcaggcatgcgtatctatttttcctgattccggccatttcaatgttgataacatcagagtttgtaaaattctgggctctggtatcagttcctcttcagtattgcatggcatggtttttaagaaggaaaccgaaggtgatgtaacatctgtcaaagatgcaaaaatagcagtgtactcttgtccttttgatggcatgataacagaaactaagggaacagtgttgataaagactgctgaagaattgatgaattttagtaagggagaagaaaacctcatggatgcacaagtcaaagctattgctgatactggtgcaaatgtcgtagtaacaggtggcaaagtggcagacatggctcttcattatgcaaataaatataatatcatgttagtgaggctaaactcaaaatgggatctccgaagactttgtaaaactgttggtgctacagctcttcctagattgacacctcctgtccttgaagaaatgggacactgtgacagtgtttacctctcagaagttggagatactcaggtggtggtttttaagcatgaaaaggaagatggcgccatttctaccatagtacttcgaggctctacagacaatctgatggatgacatagaaagggtagtagacgatggtgttaatactttcaaagttcttacaagggataaacgtcttgtacccggaggtggagcaacagaaattgaattagccaaacagatcacatcatatggagagacatgtcctggacttgaacagtatgctattaagaagtttgctgaggcatttgaagctattccccgcgcactggcagaaaactctggagttaaggccaatgaagtaatctctaaactttatgcagtacatcaagaaggaaataaaaacgttggattagatattgaggctgaagtccctgctgtaaaggacatgctggaagctggtattctagatacttacctgggaaaatattgggctatcaaactcgctactaatgctgcagtcactgtacttagagtggatcagatcatcatggcaaaaccagctggtgggcccaagcctccaagtgggaagaaagactgggatgatgaccaaaatgattgaaattggcttaatttttactgtaggtgaaggctgtatttgtagtagtactcaagaatcacctgatgttttcttattctccttaaattaagagttattttgtgtttgtattcttggctggatgttataataaacatattgttactgtc

SEQ ID NO: 5886 - protein, 548 aa, Homo sapiens
MALHVPKAPGFAQMLKEGAKHFSGLEEAVYRNIQACKELAQTTRTAYGPKGMNKMVINHLEKLFVTNDAATILRELEVQHPAAKMIVMASHMQEQEVGDGTNFVLVFAGALLELAEELLRIGLSVSEVIEGYEIACRKAHEILPNLVCCSAKNLRDIDEVSSLLRTSIMSKQYGNEVFLAKLIAQACVSIFPDSGHFNVDNIRVCKILGSGISSSSVLHGMVFKKETEGDVTSVKDAKIAVYSCPFDGMITETKGTVLIKTAEELMNFSKGEENLMDAQVKAIADTGANVVVTGGKVADMALHYANKYNIMLVRLNSKWDLRRLCKTVGATALPRLTPPVLEEMGHCDSVYLSEVGDTQVVVFKHEKEDGAISTIVLRGSTDNLMDDIERVVDDGVNTFKVLTRDKRLVPGGGATEIELAKQITSYGETCPGLEQYAIKKFAEAFEAIPRALAENSGVKANEVISKLYAVHQEGNKNVGLDIEAEVPAVKDMLEAGILDTYLGKYWAIKLATNAAVTVLRVDQIIMAKPAGGPKPPSGKKDWDDDQND

SEQ ID NO: 5887 - DNA, 2435 bp, Homo sapiens
ccctgaggcttttcggagcgagctcctcaaatcgcatccagattttcgggtccgagggaaggaggaccctgcgaaagctgcgacgactatcttcccctggggccatggactcggacgccagcctggtgtccagccgcccgtcgtcgccagagcccgatgacctttttctgccggcccggagtaagggcagcagcggcagcgccttcactgggggcaccgtgtcctcgtccaccccgagtgactgcccgccggagctgagcgccgagctgcgcggcgctatgggctctgcgggcgcgcatcctggggacaagctaggaggcagtggcttcaagtcgtcctcgtccagcacctcgtcgtctacgtcgtcggcggctgcgtcgtccaccaagaaggacaagaagcaaatgacagagccggagctgcagcagctgcgtctcaagatcaacagccgcgagcgcaagcgcatgcacgacctcaacatcgccatggatggcctccgcgaggtcatgccgtacgcacacggcccttcggtgcgcaagctttccaagatcgccacgctgctgctggcgcgcaactacatcctcatgctcaccaactcgctggaggagatgaagcgactggtgagcgagatctacgggggccaccacgctggcttccacccgtcggcctgcggcggcctggcgcactccgcgcccctgcccgccgccaccgcgcacccggcagcagcagcgcacgccgcacatcaccccgcggtgcaccaccccatcctgccgcccgccgccgcagcggctgctgccgccgctgcagccgcggctgtgtccagcgcctctctgcccggatccgggctgccgtcggtcggctccatccgtccaccgcacggcctactcaagtctccgtctgctgccgcggccgccccgctggggggcgggggcggcggcagtggggcgagcgggggcttccagcactggggcggcatgccctgcccctgcagcatgtgccaggtgccgccgccgcaccaccacgtgtcggctatgggcgccggcagcctgccgcgcctcacctccgacgccaagtgagccgactggcgccggcgcgttctggcgacaggggagccaggggccgcggggaagcgaggactggcctgcgctgggctcgggagctctgtcgcgaggaggggcgcaggaccatggactgggggtggggcatggtggggattccagcatctgcgaacccaagcaatgggggcgcccacagagcagtggggagtgaggggatgttctctccgggacctgatcgagcgctgtctggctttaacctgagctggtccagtagacatcgttttatgaaaaggtaccgctgtgtgcattcctcactagaactcatccgacccccgaccaccacctccgggaaaagattctaaaaacttctttccctgagagcgtggcctgacttgcagactcggcttgggcagcacttcggggggggagggggtgttatgggagggggacacattggggccttgctcctcttcctcctttcttggcgggtgggagactccgggtagccgcactgcagaagcaacagcccgaccgcgccctccagggtcgtccctggcccaaggccaggggccacaagttagttggaagccggcgttcggtatcagaagcgctgatggtcatatccaatctcaatatctgggtcaatccacaccctcttagaactgtggccgttcctccctgtctctcgttgatttgggagaatatggttttctaataaatctgtggatgttccttcttcaacagtatgagcaagtttatagacattcagagtagaaccacttgtggattggaataacccaaaactgccgatttcaggggcgggtgcattgtagttattattttaaaatagaaactaccccaccgactcatctttccttctctaagcacaaagtgatttggttattttggtacctgagaacgtaacagaattaaaaggcagttgctgtggaaacagtttgggttatttgggggttctgttggctttttaaaattttcttttttggatgtgtaaatttatcaatgatgaggtaagtgcgcaatgctaagctgtttgctcacgtgactgccagccccatcggagtctaagccggctttcctctattttggtttatttttgccacgtttaacacaaatggtaaactcctccacgtgcttcctgcgttccgtgcaagccgcctcggcgctgcctgcgttgcaaactgggctttgtagcgtctgccgtgtaacacccttcctctgatcgcaccgcccctcgcagagagtgtatcatctgttttatttttgtaaaaacaaagtgctaaataatatttattacttgtttggttgcaaaaacggaataaatgactgagtgttgagattttaaataaaatttaaagt

SEQ ID NO: 5888 - protein, 323 aa, Homo sapiens
MDSDASLVSSRPSSPEPDDLFLPARSKGSSGSAFTGGTVSSSTPSDCPPELSAELRGAMGSAGAHPGDKLGGSGFKSSSSSTSSSTSSAAASSTKKDKKQMTEPELQQLRLKINSRERKRMHDLNIAMDGLREVMPYAHGPSVRKLSKIATLLLARNYILMLTNSLEEMKRLVSEIYGGHHAGFHPSACGGLAHSAPLPAATAHPAAAAHAAHHPAVHHPILPPAAAAAAAAAAAAAVSSASLPGSGLPSVGSIRPPHGLLKSPSAAAAAPLGGGGGGSGASGGFQHWGGMPCPCSMCQVPPPHHHVSAMGAGSLPRLTSDAK

SEQ ID NO: 5889 - DNA, 1921 bp, Homo sapiens
ccggaagccgccgcggacaagctctcccgggcgcgggcgggggtcgtgtgcttggaggaagccgcggaacccccagcgtccgtccatggcgtggagccttgggagctggctgggtggctgcctgctggtgtcagcattgggaatggtaccacctcccgaaaatgtcagaatgaattctgttaatttcaagaacattctacagtgggagtcacctgcttttgccaaagggaacctgactttcacagctcagtacctaagttataggatattccaagataaatgcatgaatactaccttgacggaatgtgatttctcaagtctttccaagtatggtgaccacaccttgagagtcagggctgaatttgcagatgagcattcagactgggtaaacatcaccttctgtcctgtggatgacaccattattggaccccctggaatgcaagtagaagtacttgctgattctttacatatgcgtttcttagcccctaaaattgagaatgaatacgaaacttggactatgaagaatgtgtataactcatggacttataatgtgcaatactggaaaaacggtactgatgaaaagtttcaaattactccccagtatgactttgaggtcctcagaaacctggagccatggacaacttattgtgttcaagttcgagggtttcttcctgatcggaacaaagctggggaatggagtgagcctgtctgtgagcaaacaacccatgacgaaacggtcccctcctggatggtggccgtcatcctcatggcctcggtcttcatggtctgcctggcactcctcggctgcttcgccttgctgtggtgcgtttacaagaagacaaagtacgccttctcccctaggaattctcttccacagcacctgaaagagtttttgggccatcctcatcataacacacttctgtttttctcctttccattgtcggatgagaatgatgtttttgacaagctaagtgtcattgcagaagactctgagagcggcaagcagaatcctggtgacagctgcagcctcgggaccccgcctgggcaggggccccaaagctaggctctgagaaggaaacacactcggctgggcacagtgacgtactccatctcacatctgcctcagtgagggatcagggcagcaaacaagggccaagaccatctgagccagccccacatctagaactcccagaccctggacttagccaccagagagctacattttaaaggctgtcttggcaaaaatactccatttgggaactcactgccttataaaggctttcatgatgttttcagaagttggccactgagagtgtaattttcagccttttatatcactaaaataagatcatgttttaattgtgagaaacagggccgagcacagtggctcacgcctgtaataccagcaccttagaggtcgaggcaggcggatcacttgaggtcaggagttcaagaccagcctggccaatatggtgaaacccagtctctactaaaaatacaaaaattagctaggcatgatggcgcatgcctataatcccagctactcgagtgcctgaggcaggagaattgcatgaacccgggaggaggaggaggaggttgcagtgagccgagatagcggcactgcactccagcctgggtgacaaagtgagactccatctcaaaaaaaaaaaaaaaaaaaattgtgagaaacagaaatacttaaaatgaggaataagaatggagatgttacatctggtagatgtaacattctaccagattatggatggactgatctgaaaatcgacctcaactcaagggtggtcagctcaatgctacacagagcacggacttttggattctttgcagtactttgaatttatttttctacctatatatgttttatatgctgctggtgctccattaaagttttactctgtgttgc

SEQ ID NO: 5890 - DNA, 2843 bp, Homo sapiens
gaatcacactcaggcagtctctctcctttctgaacagagatgagccctaagatacctggaagattttgtttttaacctcacattaaggaaagcacacatcaccttgaaagagctaaacttgacgtcctacagaatttctctaacttaacatgttgagtctctgagagtgcaaaacttgaaacaagagaaagtggcctgcctggcatcctctgcttattgaatggttttatttaattctcctttacattgccaccttaacaatccttccagctacgtatcttaaaggatgtgatggagaagttatcaactggtgttttcagacctcagttggatgaacccattccactgtatgaggcaaaagtttccatggaagctgttcagaaaaatcaaggaagaaaaaaggtagtgcacatcagcgccctggatcgcatactttccagaagcgtcgctgaacctggcgactggactctggccgaggacctggcagaagcgccagggcagggtcaccgctgggacagtgggcgttgacggccacccgggatcgccgctgcgggctgcgtctcgcgggctgcccactgcgcatgctccgctcggaaccggcgggggcggaggcggggccgcgtcgggggcgggagctcggcgaggcgccacgtcaggggcgggcccggcgcgcgcgggaagtctctgtagggcggccggctaccctcagccgccgcgcgtcatggccctttcggtgcccggctactcaccgggtttccgaaagccgcccgaggtagtgcggctccgacggaaaagggcccggagccgtggagctgccgcctccccgccccgtgagctgacggagccggcggcccgccgagccgccctggtggcggggctgcctcttcgccctttccctgctgcggggggcagaggcggtggcagcggcggcggcccggccgctgctcggaggaaccccttcgcccgcctggacaaccgaccgcgggtcgccgcggagccccccgacgggccggcccgcgagcagccggaggccccggtcccgtttttagattctaatcaagaaaatgatttgctatgggaagagaagtttcctgaaagaacaactgttactgaattacctcagacttcacatgtatcattctccgagcctgatattccgtcctcaaaaagtactgagttacctgtggactggagtattaaaacgcgactccttttcacctcttctcaaccctttacctgggcagatcatttgaaagcacaggaagaagctcaaggtcttgtccagcattgtagggcaacagaagttactttgcctaaaagtatacaggatcccaaactctcctctgagctccgttgtaccttccagcagagccttatctattggctccaccctgctttgtcttggctaccactgttccctcgtattggagctgatagaaaaatggctggaaagacaagtccttggtcaaatgatgcaaccctgcagcatgttttaatgagtgactggtctgtgagctttacttctctatataatttgctgaagacaaaactttgcccctatttctacgtttgtacctatcagtttactgtcctgttccgagcagcaggattagctggaagtgacttaatcacagctctcatatctccaacaactcgaggtttaagagaagctatgagaaatgaaggtattgaattttctctgcctttaataaaagaaagtggccataagaaggagacagcatctggaacaagcttgggatatggggaggagcaagccatcagtgatgaggatgaagaggaaagtttttcctggctggaagagatgggtgtgcaagataaaattaaaaagccagacatactttctatcaagctgcgtaaagagaaacatgaagtacaaatggatcacagacctgaatctgttgtgttggtaaaaggaatcaacacctttacattgctcaattttttgattaactctaagagtttagttgctacctcaggtccacaggcaggacttcctccaaccctcttgtcccctgttgctttccgaggtgccacaatgcaaatgcttaaggcacggagtgtgaatgtgaagacacaagctctttctggatacagagaccaatttagtttggagattacaggtcctatcatgcctcattctctgcattcactgaccatgctgctcaaatcttcacagagtggatctttctctgcagtactgtatccacacgagccaactgctgtatttaacatctgcctgcaaatggacaaagtacttgatatggaggttgttcataaggagcttactaactgtggtttgcaccctaacactctggagcaacttagtcaaataccgttacttgggaaatcatctttacggaatgtggtgctgagagactacatttataattggagatcctgaacaccaaagtaagcctaaaaggaatctttgaggaaaaaagccttctagcaaggaaattcaagattcttgaagttgaaggaatatactgaaatgtttataaacataacttttactacagtagcatctaaggttttaaatgtgttttactattttcagattagatttttagatataaagatgaaaaactcagataactcaaatgagatatctatatccctacaacctaattgtatattgagcagaaactgaattaatatgcttccttgcaaatgggaaatcacatagcagttaccccatggcattgtgactaatggcatcagggcaaaaatatgttactttacgatttacctgttagcaggttcttgtttcataaaggtagaaaataaatacagacaacatctaaaaaaaaaaaaaaaaaaaa

SEQ ID NO: 5891 - protein, 566 aa, Homo sapiens
MALSVPGYSPGFRKPPEVVRLRRKRARSRGAAASPPRELTEPAARRAALVAGLPLRPFPAAGGRGGGSGGGPAAARRNPFARLDNRPRVAAEPPDGPAREQPEAPVPFLDSNQENDLLWEEKFPERTTVTELPQTSHVSFSEPDIPSSKSTELPVDWSIKTRLLFTSSQPFTWADHLKAQEEAQGLVQHCRATEVTLPKSIQDPKLSSELRCTFQQSLIYWLHPALSWLPLFPRIGADRKMAGKTSPWSNDATLQHVLMSDWSVSFTSLYNLLKTKLCPYFYVCTYQFTVLFRAAGLAGSDLITALISPTTRGLREAMRNEGIEFSLPLIKESGHKKETASGTSLGYGEEQAISDEDEEESFSWLEEMGVQDKIKKPDILSIKLRKEKHEVQMDHRPESVVLVKGINTFTLLNFLINSKSLVATSGPQAGLPPTLLSPVAFRGATMQMLKARSVNVKTQALSGYRDQFSLEITGPIMPHSLHSLTMLLKSSQSGSFSAVLYPHEPTAVFNICLQMDKVLDMEVVHKELTNCGLHPNTLEQLSQIPLLGKSSLRNVVLRDYIYNWRS

SEQ ID NO: 5892 - DNA, 772 bp, Homo sapiens
aagcttggcacgaggcctacaaccgcccgggagaagatggctgccccagcagtgtccgggctctcccggcaggtgcgatgcttcagtacctctgtggtcagaccatttgccaagcttgtgaggcctcctgttcaggtatacggtattgaaggtcgctatgccacagctctttattctgctgcatcaaaacagaataagctggagcaagtagaaaaggagttgttgagagtagcacaaatcctgaaggaacccaaagtggctgcttctgttttgaatccctatgtgaagcgttccattaaagtgaaaagcctaaatgacatcacagcaaaagagaggttctctcccctcactaccaacctgatcaatttgcttgctgaaaatggtcgattaagcaatacccaaggagtcgtttctgccttttctaccatgatgagtgtccatcgcggagaggtaccttgcacagtgacctctgcatctcctttagaagaagccacactctctgaattaaaaactgtcctcaagagcttcctaagtcaaggccaagtattgaaattggaggctaagactgatccgtcaatcttgggtggaatgattgtgcgcattggcgagaaatatgttgacatgtctgtcaagaccaagattcagaagctgggcagggctatgcgggagattgtctaaaagtgttggttttctgccatcagtgaaaattcttaaacttggagcaacaataaaaagcttccagaacagatcaaaaaaaaaaaaaaaaaaaaaa

SEQ ID NO: 5893 - protein, 213 aa, Homo sapiens
MAAPAVSGLSRQVRCFSTSVVRPFAKLVRPPVQVYGIEGRYATALYSAASKQNKLEQVEKELLRVAQILKEPKVAASVLNPYVKRSIKVKSLNDITAKERFSPLTTNLINLLAENGRLSNTQGVVSAFSTMMSVHRGEVPCTVTSASPLEEATLSELKTVLKSFLSQGQVLKLEAKTDPSILGGMIVRIGEKYVDMSVKTKIQKLGRAMREIV

SEQ ID NO: 5894 - DNA, 1209 bp, Homo sapiens
cagactcgagcagtctctggaacacgctgcggggctcccgggcctgagccaggtctgttctccacgcaggtgttccgcgcgccccgttcagccatgtcgtccggcatccatgtagcgctggtgactggaggcaacaagggcatcggcttggccatcgtgcgcgacctgtgccggctgttctcgggggacgtggtgctcacggcgcgggacgtgacgcggggccaggcggccgtacagcagctgcaggcggagggcctgagcccgcgcttccaccagctggacatcgacgatctgcagagcatccgcgccctgcgcgacttcctgcgcaaggagtacgggggcctggacgtgctggtcaacaacgcgggcatcgccttcaaggttgctgatcccacaccctttcatattcaagctgaagtgacgatgaaaacaaatttctttggtacccgagatgtgtgcacagaattactccctctaataaaaccccaagggagagtggtgaacgtatctagcatcatgagcgtcagagcccttaaaagctgcagcccagagctgcagcagaagttccgcagtgagaccatcactgaggaggagctggtggggctcatgaacaagtttgtggaggatacaaagaagggagtgcaccagaaggagggctggcccagcagcgcatacggggtgacgaagattggcgtcaccgttctgtccaggatccacgccaggaaactgagtgagcagaggaaaggggacaagatcctcctgaatgcctgctgcccagggtgggtgagaactgacatggcgggacccaaggccaccaagagcccagaagaaggtgcagagacccctgtgtacttggcccttttgcccccagatgctgagggtccccatggacaatttgtttcagagaagagagttgaacagtggtgagctgggctcacagctccatccatgggccccattttgtaccttgtcctgagttggtccaaagggcatttacaatgtcataaatatccttatataagaaaaaaaatgatctcttatcaattagcactcactaatgtactactaattgagcaacctacgcactcagttgactacgtaaatctgtcaggtcttttgtgatttcctctgatgcaggagaggaaaaattgtaattgatgaaaataatgaatgaaaatcaacagatgaataaatggttctttataagtg

SEQ ID NO: 5895 - protein, 277 aa, Homo sapiens
MSSGIHVALVTGGNKGIGLAIVRDLCRLFSGDVVLTARDVTRGQAAVQQLQAEGLSPRFHQLDIDDLQSIRALRDFLRKEYGGLDVLVNNAGIAFKVADPTPFHIQAEVTMKTNFFGTRDVCTELLPLIKPQGRVVNVSSIMSVRALKSCSPELQQKFRSETITEEELVGLMNKFVEDTKKGVHQKEGWPSSAYGVTKIGVTVLSRIHARKLSEQRKGDKILLNACCPGWVRTDMAGPKATKSPEEGAETPVYLALLPPDAEGPHGQFVSEKRVEQW

SEQ ID NO: 5896 - DNA, 9078 bp, Homo sapiens
ctgaactagttgccagtgatcttgaaacgtgacagtaaccaagagataaataggtgacaatgacaggaaaattagatgtagtaaaagagagtgtttgagagcagaagctatggcaactaaagactggatttgaatccttcctagcttggtgacatgagcaaattacttgatttaagtgagcattttcccatctgtacagtggagataacgataattgtgcctgctaagaagaattgctgtgaagattagtgaaataatgcatgtaaaacatttggtacagtatgtgacacatagtacaaatagtttgctaggaagattgttattattcttcacttgtgatattgtgaagttttcatacagcaaattggacatcatgagatggattgattaaataaatagatttgaacttcaaggactggtagtgttcttgctttggaaagaagaaacttggtttatcctaataatagtaggataataatggtgaagtgataggtacaagtaatagtgtttatgatgcgctggtgatgataggaaaagaaagccattatatgggcaagagctagaagtaataaaatggtgcatttttcagtgatgtttggcctatgtagctattctctgataactataaaaatccttattattgaagattcttcaggaaaaaaaaacccttagtctgaaactttagcaccaatcccccttgccccccattgaaatacgtatttttaaaacatggcttttgataatgtgagggttttttcctttttgcgatttagcagtgctgattgtgtattgcagtagttgtgagagcattagaagcagcagtcgataggaggatggaaggtctggatgccgccttggggagttaggagattggcagacttaccctgtaccactctagccctactcctttgcccaagacagaaacacactgagatggataggagaatatgagcagttgataggaaagttctcagtggagtcaggatttaggttaggccaggagattgagaatataacagtttgtgtatgatgaaatggcatatttcacagaatgcagtaaaagcaggtagggtacaagtgcagcaacaggaagatgtcttttcttcattcagcaaacacttatttgagagcttaccatgtgctaggcacatacaaagataaataagatgcccttgatgatcctctatttaaaggagacatgtaaacaggttaacttagagtagagatggtgaatatgtgaacctgaggaaaggaagaaatagattaaattatctggagagagaggaaaagtcagcagaatggggacgagaatctttcggagctcagtgttctgataggagttatttccttgggcataggttccaagtatttttctaatataccatagaagccaggaaaactttcttctgttatctcaaatgatttaattactgacttgagtttgtgttgtctccttagacttgtgcaccatggacaattttgctgagggagatttcactgtggcggattatgccttgttagaagattgccctcacgtggatgattgtgtctttgctgctgaatttatgagcaatgattatgttcgtgtgactcagctttactgtgatggggtgggtgtgcaatataaagattatatccaaagtgagaggaatttggaatttgacatctgcagtatatggtgtagtaaaccaatttctgtcctgcaagattattgcgatgccattaaaataaacatcttctggccacttctgtttcaacatcaaaacagttccgtaatatcacgattgcatccctgtgtggacgccaacaattcacgtgcttctgagataaatttgaagaaactacaacatcttgagttgatggaagatattgtggatttggcaaagaaagttgctaatgattcattccttattggaggcttattgagaattggttgtaaaatagaaaataaaatcttggcaatggaagaagctctgaattggataaaatatgcaggcgatgtaacaattctaactaaattaggatcaattgacaattgttggcctatgttaagtattttctttactgaatacaagtaccacataactaaaattgtaatggaagactgcaatttgcttgaagaacttaaaactcaaagttgtatggattgtatagaggaaggagaactaatgaaaatgaaaggaaatgaagagttttccaaagaaagatttgatatagctattatctattacaccagagccattgaatatagacctgaaaactaccttctttatggtaaccgagctctttgttttcttcgtactggacagtttagaaatgcactcggtgatggaaagagagccactattctgaagaacacttggccaaagggtcattatcgttattgtgatgctctttctatgctgggggaatatgactgggccctgcaagcaaacataaaagctcaaaaactctgtaaaaatgaccctgagggaatcaaggatctaattcagcagcatgtaaagttacaaaaacaaatagaagacctacaaggtcgaacagcaaataaggatccaattaaagccttttatgaaaacagggcctacacacctaggagtttatcagcacctatatttactacttcacttaactttgtggagaaggaaagagatttcagaaaaattaatcacgaaatggccaacggtggtaatcagaatctaaaggtggcggatgaggcgttgaaggtagatgattgtgactgtcatcctgaattttcaccaccatcaagtcagcctccaaaacataaaggaaaacaaaaatctcgaaacaatgaatcagaaaagttcagttctagttcaccattgactttaccagcagatttgaagaacatcttggagaaacagttttctaaatcttccagagctgcacaccaggattttgctaatataatgaaaatgctgagaagcttaattcaagatggctatatggccttattggagcagcgttgccgcagcgctgcacaggcctttacagagttgctgaacggtttagatcctcaaaaaataaagcaattgaacctggccatgattaactatgttttggtcgtctatggacttgccatttctctccttggaataggacagcctgaggaattatctgaagccgaaaaccagtttaagaggattattgaacactaccccagtgagggccttgattgcttggcctactgtggaattggaaaagtgtatttgaaaaaaaacagatttctagaagctctcaatcactttgagaaagcaagaaccttgatttatcgtcttcctggagtgttaacttggcccacgagtaatgtgattattgaagagtctcagccacaaaaaataaagatgctgttagagaaatttgttgaagaatgcaagttccctccagtgccagatgccatttgttgctatcagaagtgccatggatattctaagatccagatatacataactgatccagactttaagggttttatacgcatcagctgttgccagtactgtaaaatagaatttcacatgaattgctggaagaagttaaaaactacaacctttaatgataaaattgacaaggattttctacaaggaatatgtcttacccctgactgtgaaggtgtcatttctaagattatcatcttcagcagtggtggtgaagttaaatgtgaatttgaacacaaggtcataaaagaaaaggttcctccaagacctattctgaaacagaaatgttctagcctagagaaactaagactgaaagaagacaaaaaattgaagagaaagatccaaaaaaaagaagcaaaaaagttagcacaagaaagaatggaggaggacttaagagaaagtaatccacccaaaaatgaagagcagaaagaaactgtagacaatgttcagcgttgtcagttccttgatgacagaattctacagtgtataaagcagtatgctgacaagattaaatccggcatacagaatacagccatgcttctcaaagaattgctttcttggaaagttttgagcacagaagactatacaacctgtttttctagcagaaattttctaaatgaagcagtggactatgttattcgccacttgattcaagaaaataacagagtaaagacaagaatatttctgcatgttttgagtgagcttaaagaagtggagcccaaattagccgcctggatccaaaaacttaatagctttggcttagatgccacaggaactttcttttctcgttatggagcatctcttaaactgcttgattttagtatcatgactttcctctggaatgagaaatatggtcacaaactagactctatagaaggaaagcaacttgattatttctctgagccagcatcattgaaggaagcccgttgtttaatatggctgctagaagaacacagagacaagttcccagcattgcatagtgctttagatgaattctttgatataatggacagccgctgtactgtgttaaggaaacaagatagtggtgaagcaccgtttagttcaaccaaggtgaaaaacaaaagcaagaaaaagaagccaaaggattcaaagcctatgttagttgggtctggaacaacttcagtaacttcaaataatgagatcatcacttcaagtgaagaccatagcaatcgaaattcagattctgcaggcccatttgcagtgcctgaccatcttcggcaagatgtagaagaattcgaagctctctatgaccaacacagtaacgaatatgttgtccgcaataagaagctatgggacatgaacccaaaacaaaaatgttcaactctatatgattacttctctcagtttttggaggaacatggtcccttggacatgagtaacaagatgttctctgcagaatatgagtttttcccagaagaaactcgacagatactagaaaaagcaggaggtttaaaaccttttctcttgggatgccctcgttttgttgtgattgacaactgtattgcactgaagaaggttgcatcacggctcaagaaaaaaaggaagaagaaaaacattaaaacaaaagtagaagaaatttcaaaagcaggggagtatgtacgagttaaactacaactgaatccagctgctagggaatttaaaccagatgtaaagtctaaaccagtgtcagattcatcttcagcaccagcttttgaaaatgtgaaacccaaacctgtgtctgcaaattctcccaagccagcttgtgaagatgtgaaggccaaaccagtatccgacaattcttctagacaagtttctgaggatgggcaacccaaaggggtctcttctaattctcctaaaccaggctctgaggatgcaaattacaagcgagtctcctgtaattcccccaaaccggttcttgaggatgtgaaaccaacttattgggctcaatcccatttggtcacaggatactgtacgtatcttcctttccagagatttgatatcacccagacaccgccagcatacataaacgtgttaccaggtttgccccagtacaccagcatatatacacccttggccagcctttctcctgaatatcagctaccaagatcagtaccagtggtgccgtcttttgtagccaatgacagagcagataaaaatgctgctgcctattttgagggtcatcatttgaatgctgagaatgttgctggtcaccagattgcctctgaaacacagatccttgagggctctttgggaatatctgtaaagtcacactgcagcacaggtgatgctcatacagtcctgagtgagtctaacagaaatgatgagcactgtggaaattctaacaacaaatgtgaagtaattccagaaagcaccagtgcagtaacaaacattccacacgtgcagatggttgccatacaggtatcttggaacataatacaccaagaagtcaatactgagccatataatccttttgaggaacgacaaggggaaatttcacggattgaaaaggagcaccaagtattacaagaccaacttcaagaagtgtatgaaaattatgagcagataaaacttaagggcttagaagagaccagggacctggaagagaagttgaaaaggcacttagaagaaaacaagatctcaaagacggaattagattggttccttcaagatttggaaagagaaattaaaaaatggcaacaggaaaaaaaagaaatccaagaaagactaaaatcactgaagaagaaaattaaaaaggtttcaaatgccagtgaaatgtatacccagaaaaatgatggaaaggaaaaggaacatgaattacatctggatcagtcccttgaaatcagcaacacacttacaaatgagaaaatgaaaatagaagagtatataaagaaagggaaagaggattatgaagagagtcatcagagagctgtggctgcagaggtatccgtacttgaaaactggaaggagagtgaagtgtataagctacagatcatggagtcacaagcagaagcctttctgaagaagctggggctgattagccgtgatcctgcagcatatcctgacatggagtctgatatacgttcatgggaattgtttctttctaatgttacaaaagaaattgagaaagcaaagtctcagtttgaagaacaaattaaggcaattaaaaatggttctcggctcagtgaactttctaaagtgcagatttctgagctttcatttcctgcctgtaacacggttcatcccgagttactccctgagtcttcaggccacgatggccaagggcttgtgacttctgcaagcgacgtgactggaaaccacgcagcacttcacagggatcctagtgtgttctctgctggtgattccccaggggaggctccttctgcgctgttgccagggccaccccctggtcagcctgaagccactcagctgacagggccaaaacgggctggccaggcagctctgtcagaacgaagccctgtggctgatcggaagcagcctgttcctccaggacgtgctgcgcgttcaagccagtctccaaaaaagccgttcaatagtattattgagcacctgtcagtggtattcccatgttacaacagcactgagcttgctggttttattaaaaaagtgcgaagcaaaaacaagaactcactctcaggattgagtattgatgaaattgtccaaagagtgacagaacacattctagatgaacagaaaaagaaaaagccaaacccaggaaaggacaagaggacttatgagcccagctctgccacccccgtgaccaggtcctcccagggctcaccctcggtggttgttgcaccatcacccaaaaccaaggggcagaaagcagaagatgtccctgtgaggattgcactgggtgcaagttcctgtgaaatatgccacgaggtgttcaaatcaaaaaacgtgcgtgtgctcaaatgtgggcacaagtatcacaaagggtgctttaagcagtggcttaaagggcagagcgcttgcccggcctgccagggtcgtgatctcctgacagaagagtcaccttctggaagaggctggcccagtcagaatcaggagctgccttcctgctcttctaggtagtcacacttcactaaagtgtcatccaccagtgtgttgaatccgaagaatgacaattttctaccactggtgtaaaaaacaaacatttgaagacccttgtgcattgtgtgtcacaaagctaaatacatggaaatcgttaatatcgctgatattaagtaatttccccactctgagtgaatactttgatgattgccaacagtggctaataaaatgacggctaccacactcatgggtcactggggctgcgcagggctctttgaggtgggtggcttcttttggaaagtactatgaacgtctcgaagcagtattctagtgataagaattcttaacatagccaagcgccccacgtttgttccccacgtttgttccccttttctgtttgaaaaacctgttctggtagctccacaagagagatgatactgactttttaaattttttacaagagtctgtattcctgatatgcctatatttttcctcaaagattctgcattttaaggatgggcataagcaaactatattttaataatttatagttaatgttaaaatattggctgatttagaccaaaagattcaaatctcctctttgtgaaatcccatctgcatttgattttttattattttatgttcccccgttagattgttttaagtgtttgcttttcatcttttatagatgtaatctgattttcaaaaatcattaacactttttaattagtatcgactaagactttttccccctggaatcgaggctgtgtgtccgtcatcccagcccccggttggagcctgctctttgaactccgctgccttccttagcagcttctgtcctcttctgtgagtcagtcagcgagtgcttgggatccgcatccagccgtgctgagcacacaacaggctgtgtgtggaaatggccaccaccattctccttccccaccccaccacaaaaagagaagctgtgtctttagacaaccctgaggtatctgtgttacaatcgttctgtgtttgatatttgtgtaaagtatgcatgcagtcttgtactgtgacctaagaacaaaactgtaactgcattagaaaccatgaaaaaattagatattgttttgtgacttttagacagtggtaaatatagaaccatgaattctggtcacattccatttctctccaacatgaaggatcaaaaaatgtttttcaatgtgttctttgttccactggaaacttagagtcatgagtttatgagctgatttggtcaccttcctctgcctttgttcactgtgagttctgatgtcttagtgacttagttcttagaagctcacgccttagtttgaaacagattctccacggtggtccccaaaacactgtctgcatatccataagaattgagcgctatgggtgttaacgtgcatgaggatcagtttgcagcagcaagtacaaaaggagaagaggaacatccgttgaatgagtgtgttttgtacataacttcagatacttgtgaacatgccttatatttgtccaacaactgtcagaataaagaacattctaaaatgag

SEQ ID NO: 5897 - protein, 2025 aa, Homo sapiens
MDNFAEGDFTVADYALLEDCPHVDDCVFAAEFMSNDYVRVTQLYCDGVGVQYKDYIQSERNLEFDICSIWCSKPISVLQDYCDAIKINIFWPLLFQHQNSSVISRLHPCVDANNSRASEINLKKLQHLELMEDIVDLAKKVANDSFLIGGLLRIGCKIENKILAMEEALNWIKYAGDVTILTKLGSIDNCWPMLSIFFTEYKYHITKIVMEDCNLLEELKTQSCMDCIEEGELMKMKGNEEFSKERFDIAIIYYTRAIEYRPENYLLYGNRALCFLRTGQFRNALGDGKRATILKNTWPKGHYRYCDALSMLGEYDWALQANIKAQKLCKNDPEGIKDLIQQHVKLQKQIEDLQGRTANKDPIKAFYENRAYTPRSLSAPIFTTSLNFVEKERDFRKINHEMANGGNQNLKVADEALKVDDCDCHPEFSPPSSQPPKHKGKQKSRNNESEKFSSSSPLTLPADLKNILEKQFSKSSRAAHQDFANIMKMLRSLIQDGYMALLEQRCRSAAQAFTELLNGLDPQKIKQLNLAMINYVLVVYGLAISLLGIGQPEELSEAENQFKRIIEHYPSEGLDCLAYCGIGKVYLKKNRFLEALNHFEKARTLIYRLPGVLTWPTSNVIIEESQPQKIKMLLEKFVEECKFPPVPDAICCYQKCHGYSKIQIYITDPDFKGFIRISCCQYCKIEFHMNCWKKLKTTTFNDKIDKDFLQGICLTPDCEGVISKIIIFSSGGEVKCEFEHKVIKEKVPPRPILKQKCSSLEKLRLKEDKKLKRKIQKKEAKKLAQERMEEDLRESNPPKNEEQKETVDNVQRCQFLDDRILQCIKQYADKIKSGIQNTAMLLKELLSWKVLSTEDYTTCFSSRNFLNEAVDYVIRHLIQENNRVKTRIFLHVLSELKEVEPKLAAWIQKLNSFGLDATGTFFSRYGASLKLLDFSIMTFLWNEKYGHKLDSIEGKQLDYFSEPASLKEARCLIWLLEEHRDKFPALHSALDEFFDIMDSRCTVLRKQDSGEAPFSSTKVKNKSKKKKPKDSKPMLVGSGTTSVTSNNEIITSSEDHSNRNSDSAGPFAVPDHLRQDVEEFEALYDQHSNEYVVRNKKLWDMNPKQKCSTLYDYFSQFLEEHGPLDMSNKMFSAEYEFFPEETRQILEKAGGLKPFLLGCPRFVVIDNCIALKKVASRLKKKRKKKNIKTKVEEISKAGEYVRVKLQLNPAAREFKPDVKSKPVSDSSSAPAFENVKPKPVSANSPKPACEDVKAKPVSDNSSRQVSEDGQPKGVSSNSPKPGSEDANYKRVSCNSPKPVLEDVKPTYWAQSHLVTGYCTYLPFQRFDITQTPPAYINVLPGLPQYTSIYTPLASLSPEYQLPRSVPVVPSFVANDRADKNAAAYFEGHHLNAENVAGHQIASETQILEGSLGISVKSHCSTGDAHTVLSESNRNDEHCGNSNNKCEVIPESTSAVTNIPHVQMVAIQVSWNIIHQEVNTEPYNPFEERQGEISRIEKEHQVLQDQLQEVYENYEQIKLKGLEETRDLEEKLKRHLEENKISKTELDWFLQDLEREIKKWQQEKKEIQERLKSLKKKIKKVSNASEMYTQKNDGKEKEHELHLDQSLEISNTLTNEKMKIEEYIKKGKEDYEESHQRAVAAEVSVLENWKESEVYKLQIMESQAEAFLKKLGLISRDPAAYPDMESDIRSWELFLSNVTKEIEKAKSQFEEQIKAIKNGSRLSELSKVQISELSFPACNTVHPELLPESSGHDGQGLVTSASDVTGNHAALHRDPSVFSAGDSPGEAPSALLPGPPPGQPEATQLTGPKRAGQAALSERSPVADRKQPVPPGRAARSSQSPKKPFNSIIEHLSVVFPCYNSTELAGFIKKVRSKNKNSLSGLSIDEIVQRVTEHILDEQKKKKPNPGKDKRTYEPSSATPVTRSSQGSPSVVVAPSPKTKGQKAEDVPVRIALGASSCEICHEVFKSKNVRVLKCGHKYHKGCFKQWLKGQSACPACQGRDLLTEESPSGRGWPSQNQELPSCSSR

SEQ ID NO: 5898 - DNA, 1080 bp, Homo sapiens
ctcgcgcaagcggcgtgcggtcccgcggcgctgcagttgtgtccagccggtcacggggcggctatggcggccacgttcttcggagaggtggtgaaggcgccgtgccgagctgggactgaggacgaagaggaggaggaggaggggcggagggagacgcccgaggacagggaggtgcgtctgcagctggcgcggaagagggaagtgcggctccttcgaagacaaacaaaaacatctttggaagtttctttgctagaaaaatatccgtgctccaagtttataattgctataggaaataatgcagtagcatttctgtcatcatttgttatgaattcaggagtctgggaggaagttggttgtgccaaactctggaatgaatggtgtagaacaacagacactacacatctgtcctccacagaggctttttgtgtgttttatcatctaaaatccaatccctcggtttttctctgtcagtgcagttgctatgttgcagaagatcaacagtatcagtggctggaaaaggtttttggctcttgtccaaggaagaacatgcagataactattctcacatgtcgacatgttaccgattataaaacctcagaatccaccggcagccttccttctcctttcctgagagccctaaaaacacagaatttcaaagactcggcgtgttgtccattgctagaacaaccgaatatagtacacgaccttcctgcagcagttctaagctactgtcaagtatggaaaatcccagcaattctgtacttgtgttatactgatgtgatgaaattagacctaatcacagtggaagcttttaagcctatactttctaccagaagcttgaagggtttggttaagaatattccccaaagcactgagatactaaagaaattgatgacaacaaatgagattcagagtaacatttatacatgatcttaaacattgttttgtagtgtatattacttgtccattcctttaaggggagcagcctgcactcttttgtagattacttttgggggatatattttgagaatgatgaaacggaataaaattgtaaaaaactaaaaaaaaaaaaaaaaaaaa

SEQ ID NO: 5899 - protein, 288 aa, Homo sapiens
MAATFFGEVVKAPCRAGTEDEEEEEEGRRETPEDREVRLQLARKREVRLLRRQTKTSLEVSLLEKYPCSKFIIAIGNNAVAFLSSFVMNSGVWEEVGCAKLWNEWCRTTDTTHLSSTEAFCVFYHLKSNPSVFLCQCSCYVAEDQQYQWLEKVFGSCPRKNMQITILTCRHVTDYKTSESTGSLPSPFLRALKTQNFKDSACCPLLEQPNIVHDLPAAVLSYCQVWKIPAILYLCYTDVMKLDLITVEAFKPILSTRSLKGLVKNIPQSTEILKKLMTTNEIQSNIYT

SEQ ID NO: 5900 - DNA, 1991 bp, Homo sapiens
cgcggcggctggcgtcgggaaagtacagtaaaaagtccgagtgcagccgccgggcgcaggatgggatccggctcctccagctaccggcccaaggccatctacctggacatcgatggacgcattcagaaggtaatcttcagcaagtactgcaactccagcgacatcatggacctgttctgcatcgccaccggcctgcctcggaacacgaccatctccctgctgaccaccgacgacgccatggtctccatcgaccccaccatgcccgcgaattcagaacgcactccgtacaaagtgagacctgtggccatcaagcaactctccgctggtgtcgaggacaagagaaccacaagccgtggccagtctgctgagagaccactgagggacagacgggttgtgggcctggagcagccccggagggaaggagcatttgaaagtggacaggtagagcccaggcccagagagccccagggctgctaccaggaaggccagcgcatccctccagagagagaagaattaatccagagcgtgctggcgcaggttgcagagcagttctcaagagcattcaaaatcaatgaactgaaagctgaagttgcaaatcacttggctgtcctagagaaacgcgtggaattggaaggactaaaagtggtggagattgagaaatgcaagagtgacattaagaagatgagggaggagctggcggccagaagcagcaggaccaactgcccctgtaagtacagttttttggataaccacaagaagttgactcctcgacgcgatgttcccacttaccccaagtacctgctctctccagagaccatcgaggccctgcggaagccgacctttgacgtctggctttgggagcccaatgagatgctgagctgcctggagcacatgtaccacgacctcgggctggtcagggacttcagcatcaaccctgtcaccctcaggaggtggctgttctgtgtccacgacaactacagaaacaaccccttccacaacttccggcactgcttctgcgtggcccagatgatgtacagcatggtctggctctgcagtctccaggagaagttctcacaaacggatatcctgatcctaatgacagcggccatctgccacgatctggaccatcccggctacaacaacacgtaccagatcaatgcccgcacagagctggcggtccgctacaatgacatctcaccgctggagaaccaccactgcgccgtggccttccagatcctcgccgagcctgagtgcaacatcttctccaacatcccacctgatgggttcaagcagatccgacagggaatgatcacattaatcttggccactgacatggcaagacatgcagaaattatggattctttcaaagagaaaatggagaattttgactacagcaacgaggagcacatgaccctgctgaagatgattttgataaaatgctgtgatatctctaacgaggtccgtccaatggaagtcgcagagccttgggtggactgtttattagaggaatattttatgcagagcgaccgtgagaagtcagaaggccttcctgtggcaccgttcatggaccgagacaaagtgaccaaggccacagcccagattgggttcatcaagtttgtcctgatcccaatgtttgaaacagtgaccaagctcttccccatggttgaggagatcatgctgcagccactttgggaatcccgagatcgctacgaggagctgaagcggatagatgacgccatgaaagagttacagaagaagactgacagcttgacgtctggggccaccgagaagtccagagagagaagcagagatgtgaaaaacagtgaaggagactgtgcctgaggaaagcggggggcgtggctgcagttctggacgggctggccgagctgcgcgggatccttgtgcagggaagagctgccctgggcacctggcaccacaagaccatgttttctaagaaccattttgttcactgatacaaaaaaaaaaaaaaa

SEQ ID NO: 5901 - protein, 593 aa, Homo sapiens
MGSGSSSYRPKAIYLDIDGRIQKVIFSKYCNSSDIMDLFCIATGLPRNTTISLLTTDDAMVSIDPTMPANSERTPYKVRPVAIKQLSAGVEDKRTTSRGQSAERPLRDRRVVGLEQPRREGAFESGQVEPRPREPQGCYQEGQRIPPEREELIQSVLAQVAEQFSRAFKINELKAEVANHLAVLEKRVELEGLKVVEIEKCKSDIKKMREELAARSSRTNCPCKYSFLDNHKKLTPRRDVPTYPKYLLSPETIEALRKPTFDVWLWEPNEMLSCLEHMYHDLGLVRDFSINPVTLRRWLFCVHDNYRNNPFHNFRHCFCVAQMMYSMVWLCSLQEKFSQTDILILMTAAICHDLDHPGYNNTYQINARTELAVRYNDISPLENHHCAVAFQILAEPECNIFSNIPPDGFKQIRQGMITLILATDMARHAEIMDSFKEKMENFDYSNEEHMTLLKMILIKCCDISNEVRPMEVAEPWVDCLLEEYFMQSDREKSEGLPVAPFMDRDKVTKATAQIGFIKFVLIPMFETVTKLFPMVEEIMLQPLWESRDRYEELKRIDDAMKELQKKTDSLTSGATEKSRERSRDVKNSEGDCA

SEQ ID NO: 5902 - DNA, 2381 bp, Homo sapiens
ccacgagacattggccggcgccggcctccgcccccgcctctccgccaatcaccgcccgcctgctcccctcgccgtgggtccccgcgaggccgccaccccggggtcgccgtctccgcctcgccgcagtcggggcagccgctcgcccctcttttccatgtatccgtccaggatcccatgacagattctgttgtcacgtctccttacagagtttgagcggtgctgaactgtcagcaccatctgtccggtcccagcatgccttctgagaccccccaggcagaagtggggcccacaggctgcccccaccgctcagggccacactcggcgaaggggagcctggagaaggggtccccagaggataaggaagccaaggagcccctgtggatccggcccgatgctccgagcaggtgcacctggcagctgggccggcctgcctccgagtccccacatcaccacactgccccggcaaaatctccaaaaatcttgccagatattctgaagaaaatcggggacacccctatggtcagaatcaacaagattgggaagaagttcggcctgaagtgtgagctcttggccaagtgtgagttcttcaacgcgggcgggagcgtgaaggaccgcatcagcctgcggatgattgaggatgctgagcgcgacgggacgctgaagcccggggacacgattatcgagccgacatccgggaacaccgggatcgggctggccctggctgcggcagtgaggggctatcgctgcatcatcgtgatgccagagaagatgagctccgagaaggtggacgtgctgcgggcactgggggctgagattgtgaggacgcccaccaatgccaggttcgactccccggagtcacacgtgggggtggcctggcggctgaagaacgaaatccccaattctcacatcctagaccagtaccgcaacgccagcaaccccctggctcactacgacaccaccgctgatgagatcctgcagcagtgtgatgggaagctggacatgctggtggcttcagtgggcacgggcggcaccatcacgggcattgccaggaagctgaaggagaagtgtcctggatgcaggatcattggggtggatcccgaagggtccatcctcgcagagccggaggagctgaaccagacggagcagacaacctacgaggtggaagggatcggctacgacttcatccccacggtgctggacaggacggtggtggacaagtggttcaagagcaacgatgaggaggcgttcacctttgcccgcatgctgatcgcgcaagaggggctgctgtgcggtggcagtgctggcagcacggtggcggtggccgtgaaggccgcgcaggagctgcaggagggccagcgctgcgtggtcattctgcccgactcagtgcggaactacatgaccaagttcctgagcgacaggtggatgctgcagaagggctttctgaaggaggaggacctcacggagaagaagccctggtggtggcacctccgtgttcaggagctgggcctgtcagccccgctgaccgtgctcccgaccatcacctgtgggcacaccatcgagatcctccgggagaagggcttcgaccaggcgcccgtggtggatgaggcgggggtaatcctgggaatggtgacgcttgggaacatgctctcgtccctgcttgccgggaaggtgcagccgtcagaccaagttggcaaagtcatctacaagcagttcaaacagatccgcctcacggacacgctgggcaggctctcgcacatcctggagatggaccacttcgccctggtggtgcacgagcagatccagtaccacagcaccgggaagtccagtcagcggcagatggtgttcggggtggtcaccgccattgacttgctgaacttcgtggccgcccaggagcgggaccagaagtgaagtccggagcgctgggcggatgtttcaccaaggaaatattgagagagaagtcggccaggtaggatgaacacaggcaatgactgcgcagagtggattaaaggcaaaagagagaagagtccaggaaggggcggggagaagcctgggtggctcagcatcctccacgggctgcgccgtctgctcggggctgagctggcgggagcagtttgcgtgtttgggttttttaattgagatgaaattcaaataacctaaaaatcaatcacttgaaagtgaacaatcagcggcatttagtacatccagaaagttgtgtaggcaccacctctgtcacgttctggaacattctgtcatcaccccgtgaagcaatcatttcccctcccgtcttcctcctcccctggcaactgctgatcgactttgtgtctctgttgtctaaaataggttttccctgttctggacatttcatataaatggaatcacac

SEQ ID NO: 5903 - DNA, 937 bp, Homo sapiens
cccgagggcgtcggcagggtcggcggcgtcggcagcagtgtcgacggcagcggcggcggcgggtgggaaatggcggagtatctggcctccatcttcggcaccgagaaagacaaagtcaactgttcattttatttcaaaattggagcatgtcgtcatggagacaggtgctctcggttgcacaataaaccgacgtttagccagaccattgccctcttgaacatttaccgtaaccctcaaaactcttcccagtctgctgacggtttgcgctgtgccgtgagcgatgtggagatgcaggaacactatgatgagttttttgaggaggtttttacagaaatggaggagaagtatggggaagtagaggagatgaacgtctgtgacaacctgggagaccacctggtggggaacgtgtacgtcaagtttcgccgtgaggaagatgcggaaaaggctgtgattgacttgaataaccgttggtttaatggacagccgatccacgccgagctgtcacccgtgacggacttcagagaagcctgctgccgtcagtatgagatgggagaatgcacacgaggcggcttctgcaacttcatgcatttgaagcccatttccagagagctgcggcgggagctgtatggccgccgtcgcaagaagcatagatcaagatcccgatcccgggagcgtcgttctcggtctagagaccgtggtcgtggcggtggcggtggcggtggtggaggtggcggcggacgggagcgtgacaggaggcggtcgagagatcgtgaaagatctgggcgattctgagccatgccatttttaccttatgtctgctagaaagtgttgtagttgattgaccaaaccagttcataaggggaattttttttaaaaaacaacaaaaaaaaaaacatacaaagatgggtttctgaataaaatttgtagtgataacagt

SEQ ID NO: 5904 - protein, 240 aa, Homo sapiens
MAEYLASIFGTEKDKVNCSFYFKIGACRHGDRCSRLHNKPTFSQTIALLNIYRNPQNSSQSADGLRCAVSDVEMQEHYDEFFEEVFTEMEEKYGEVEEMNVCDNLGDHLVGNVYVKFRREEDAEKAVIDLNNRWFNGQPIHAELSPVTDFREACCRQYEMGECTRGGFCNFMHLKPISRELRRELYGRRRKKHRSRSRSRERRSRSRDRGRGGGGGGGGGGGGRERDRRRSRDRERSGRF

SEQ ID NO: 5905 - DNA, 1331 bp, Homo sapiens
cggagccgcccgctgaggtcagaaggaggcgtctgcgctgatcgggtccgccgcgcgccagagccagagtcgcagccgaggggagccggggccggagcccgagcccgagccgagccggagcccgagcgagcggcggagaccgtgcccccgcctcggccccgcgccgccgcggccaggcccggcatggaggaggagtgccgggtgctctccatacagagccacgtcatccgcggctacgtgggcaaccgggcggccacgttcccgctgcaggttttgggatttgagattgacgcggtgaactctgtccagttttcaaaccacacaggctatgcccactggaagggccaagtgctgaattcagatgagctccaggagttgtacgaaggcctgaggctgaacaacatgaataaatatgactacgtgctcacaggttatacgagggacaagtcgttcctggccatggtggtggacattgtgcaggagctgaagcagcagaaccccaggctggtgtacgtgtgtgatccagtcttgggtgacaagtgggacggcgaaggctcgatgtacgtcccggaggacctccttcccgtctacaaagaaaaagtggtgccgcttgcagacattatcacgcccaaccagtttgaggccgagttactgagtggccggaagatccacagccaggaggaagccttgcgggtgatggacatgctgcactctatgggccccgacaccgtggtcatcaccagctccgacctgccctccccgcagggcagcaactacctgattgtgctggggagtcagaggaggaggaatcccgctggctccgtggtgatggaacgcatccggatggacattcgcaaagtggacgccgtctttgtgggcactggggacctgtttgctgccatgctcctggcgtggacacacaagcaccccaataacctcaaggtggcctgtgagaagaccgtgtctaccttgcaccacgttctgcagaggaccatccagtgtgcaaaagcccaggccggggaaggagtgaggcccagccccatgcagctggagctgcggatggtgcagagcaaaagggacatcgaggacccagagatcgtcgtccaggccacggtgctgtgagggccccgccgcttgcccgtgacacgcagcgcgttggtgtctccgtgtttgtccctgtgaaaacatgtaacgtctgccttagagccatgaccgaaacttgatatttttttctttcatgagtgtccggcatctgctggtcttcattgtgaaacgtgccagtcgtgctttgtgaaaaataacaaagtggtcacaaaaaaaaaaaaaaaaaa

SEQ ID NO: 5906 - protein, 312 aa, Homo sapiens
MEEECRVLSIQSHVIRGYVGNRAATFPLQVLGFEIDAVNSVQFSNHTGYAHWKGQVLNSDELQELYEGLRLNNMNKYDYVLTGYTRDKSFLAMVVDIVQELKQQNPRLVYVCDPVLGDKWDGEGSMYVPEDLLPVYKEKVVPLADIITPNQFEAELLSGRKIHSQEEALRVMDMLHSMGPDTVVITSSDLPSPQGSNYLIVLGSQRRRNPAGSVVMERIRMDIRKVDAVFVGTGDLFAAMLLAWTHKHPNNLKVACEKTVSTLHHVLQRTIQCAKAQAGEGVRPSPMQLELRMVQSKRDIEDPEIVVQATVL

SEQ ID NO: 5907 - DNA, 2949 bp, Homo sapiens
gcgtgctcagtgtgctgggtaccaggcgactccgggacagggggtctcggccgtcggcgtcatggtttcgcgcgtgcagctcccgcctgagatccagctggctcagcgcctggcggggaatgagcaggtgacccgggaccgggcggtgaggaagctccggaaatacatcgtcgccaggactcagcgggccgcaggtggttttacgcacgacgagctgctgaaggtgtggaaaggactgttttattgcatgtggatgcaggacaagccactcctccaggaagaattaggaaggactatttcccagctcgttcatgcttttcagaccacggaggcgcagcacctgttccttcaggccttctggcagaccatgaatcgcgagtggacgggcattgacaggctgcgcctggataaattctacatgctcatgcggatggtcctgaacgagtccttgaaggttctgaagatgcaaggctgggaagaaagacagatcgaggagctgctagagctgctgatgactgagatcctgcaccccagcagccaggcccccaacggtgtgaagagccacttcatcgagatcttcctggaggagctgaccaaagtgggcgccgaggagcttacggcagaccagaacctgaagttcatcgaccccttctgcagaattgctgcccggaccaaggattccttggttttgaacaacatcactcgaggcatctttgagacgattgtggagcaggccccgcttgccattgaagacctcctgaatgaactggacacacaggatgaggaggtggcgtcggacagtgatgagtcctctgagggtggtgagcgtggagacgcgctgtcccagaagaggtctgagaagccgcccgcaggctccatctgcagggctgaacctgaggctggtgaggagcaggcaggtgacgacagggacagtggcggccccgttctccagtttgactacgaggcagttgctaacagactgtttgaaatggccagccgccagagcaccccttctcagaacagaaagcgtctctacaaagtgatccggaagctgcaggacctggcaggaggcattttccctgaagatgagatcccagagaaggcctgcaggcgcctgcttgaagggaggcggcagaagaagacgaagaagcagaagcgtctgctcaggttgcagcaggagagagggaaaggtgagaaggagcccccgagcccgggcatggagaggaagaggagcaggaggaggggtgtaggggccgaccccgaggcgcgggcagaggctggtgagcagccaggcacagctgagcgggccctgctccgagatcagcccaggggccgtggccagagaggggctcgccagagaaggaggacacctcggcccctgaccagtgcccgagcaaaggcggccaatgtccaggagccggagaagaagaagaaacgcagggagtgatgtggccgggccaaggacaggcagggagggaggccaggcctcgcttgcaccgcgggacgaggctgaccgggctgttctgtagactcaggaccgtggctccagaactcctgtgccaggcgggagggaagggcggcactggagagatgggcccatcattaggggccagcatcccaggaactggacctttccccagagcctccgcctgtggctgtgatgaccttgggccagaaggtcaaactccgaagactgaaactctgcctgcagcaggactggccgcccctgctgtggggggttcagaaaataaaatgccgcgcagcccttgccaggggaagtgtcgcttcaggtgtgtcctacggacgtgtgggaggtggcaggcgccagcctccgagcagtgtggtggtttatattcatgtttgtggaaaaatcttgcaagacatttctcctttcacagaactgcccaggtgttaacagggctgtctggacggggctcttttgcttccccctcaatctggggtctagagttgtgcaaggaattcagctccagtaaggcctggattgcccggggtgagcgtgtgtgtggtgggaagacctggcttccgcgagagccttgttcctggaggcaggagcgccccgccatcctgggtacccgcgggtccgcaggctgcgcacctctttccctcagccaggtcaccctcagcgtcctccctgcccctctccccttcacacctgctggagcctgtgagggaggtggcgggtccccactgtggcgacggagagctgacagtagcccagggctttccacctgcatggaacaagggcctgtctgccgccagcgctgtggccacagcctgcataggtgacaaggggccgctgcgttgggttttgcccgcatcttctgttccatgggtgcccagccagccaggccgtgtgggatccagcgagaggccagggcttggagtgggcctgggaccaggaaggacctctaggctgtggctggccttgtgcagaccctggactgcatccggttccccaaagccctgctgcattcgagtgtcccccaaccccgggcaggtggcacctggtgacacctccttcagtcccactcagctgggcggccggggcaggcttagggcacagttaggggccaaggagagggaaggccagggcccctgttctaggggttagggttctttccccaaaggaacttaaaaagacaagcgtggccaggcacagtggctcacacctgtaatcccagcactttgggaggccgaggtggccagatcacctgaggtcaggagtttgagaccagactgaccaacatggagaaaccccatctctactaaaatacaaaattagccaggcgtggtggcacatgcctgtaatcccagctactcgggaggctgaggcaggagaattgcttgaacctgggaggcagaggttgtggtgagctaagatcacgccattgcactccagcctgggcaacgagagggaaactctgtttc

SEQ ID NO: 5908 - DNA, 1660 bp, Homo sapiens
tctatgaaaccaacatacatggcgtttgcatcacagttggagtcagatgtgagcccggagggcaggtgtctggcttgtccacccggaagccctgagggcagctgttcccactggctctgctgaccttgtgccttggacggctgtcctcagcgaggggccgtgcacccgctcctgagcagcgccatgggcctgctggccttcctgaagacccagttcgtgctgcacctgctggtcggctttgtcttcgtggtgagtggtctggtcatcaacttcgtccagctgtgcacgctggcgctctggccggtcagcaagcagctctaccgccgcctcaactgccgcctcgcatactcactctggagccaactggtcatgctgctggagtggtggtcctgcacggagtgtacactgttcacggaccaggccacggtagagcgctttgggaaggagcacgcagtcatcatcctcaaccacaacttcgagatcgacttcctctgtgggtggaccatgtgtgagcgcttcggagtgctggggagctccaaggtcctcgctaagaaggagctgctctacgtgcccctcatcggctggacgtggtactttctggagattgtgttctgcaagcggaagtgggaggaggaccgggacaccgtggtcgaagggctgaggcgcctgtcggactaccccgagtacatgtggtttctcctgtactgcgaggggacgcgcttcacggagaccaagcaccgcgttagcatggaggtggcggctgctaaggggcttcctgtcctcaagtaccacctgctgccgcggaccaagggcttcaccaccgcagtcaagtgcctccgggggacagtcgcagctgtctatgatgtaaccctgaacttcagaggaaacaagaacccgtccctgctggggatcctctacgggaagaagtacgaggcggacatgtgcgtgaggagatttcctctggaagacatcccgctggatgaaaaggaagcagctcagtggcttcataaactgtaccaggagaaggacgcgctccaggagatatataatcagaagggcatgtttccaggggagcagtttaagcctgcccggaggccgtggaccctcctgaacttcctgtcctgggccaccattctcctgtctcccctcttcagttttgtcttgggcgtctttgccagcggatcacctctcctgatcctgactttcttggggtttgtgggagcagcttcctttggagttcgcagactgataggagtaactgagatagaaaaaggctccagctacggaaaccaagagtttaagaaaaaggaataattaatggctgtgactgaacacacgcggccctgacggtggtatccagttaactcaaaaccaacacacagagtgcaggaaaagacaattagaaactatttttcttattaactggtgactaatattaacaaaacttgagccaagagtaaagaattcagaaggcctgtcaggtgaagtcttcagcctcccacagcgcagggtcccagcatctccacgcgcgcccgtgggaggtgggtccggccggagaggcctcccgcggacgccgtctctccagaactccgcttccaagagggacctttggctgctttctctccttaaacttagatcaaattttaaaaaaaaaaaaaaa

SEQ ID NO: 5909 - protein, 376 aa, Homo sapiens
MGLLAFLKTQFVLHLLVGFVFVVSGLVINFVQLCTLALWPVSKQLYRRLNCRLAYSLWSQLVMLLEWWSCTECTLFTDQATVERFGKEHAVIILNHNFEIDFLCGWTMCERFGVLGSSKVLAKKELLYVPLIGWTWYFLEIVFCKRKWEEDRDTVVEGLRRLSDYPEYMWFLLYCEGTRFTETKHRVSMEVAAAKGLPVLKYHLLPRTKGFTTAVKCLRGTVAAVYDVTLNFRGNKNPSLLGILYGKKYEADMCVRRFPLEDIPLDEKEAAQWLHKLYQEKDALQEIYNQKGMFPGEQFKPARRPWTLLNFLSWATILLSPLFSFVLGVFASGSPLLILTFLGFVGAASFGVRRLIGVTEIEKGSSYGNQEFKKKE

SEQ ID NO: 5910 - DNA, 3193 bp, Homo sapiens
gcggcacacgtgcgacggccgtgatgaagttcgcttaccggttttcaaatttgctgggtacggtgtaccggcgtgggaacctaaattttacctgcaatggaaattcagttatcagtcccgtgggcaatagagtcactgtatttgaccttaaaaacaacaaatctgacacgctgcccctggccactcggtacaacgtcaagtgcgtggggctgtccccggatggccgcctcgctatcatcgtcgatgaagggggcgatgcgctgctggtcagcctggtctgcaggtctgtgctgcaccacttccacttcaagggctctgtgcacagtgtgtccttctcccctgatggcaggaagtttgttgtcacaaagggtaacattgcccagatgtatcatgcccctgggaagaagcgggagttcaacgccttcgttctggacaagacctattttgggccctacgatgagaccacctgcatcgactggacggatgactccaggtgctttgtggttgggagcaaagacatgtccacctgggtgttcggagccgagcgctgggacaacctcatctactatgcactggggggacataaggatgccatcgtggcctgcttctttgaatccaacagcctggacctgtactcactcagccaggacggagtgctgtgcatgtggcagtgtgacacgccccccgagggcttgcggctgaagccccctgcgggctggaaagcagacctgttgcagcgggaggaggaagaggaggaggaggaggaccaggagggcgacagagagaccaccatccggggaaaagccactccggccgaggaggagaagacaggaaaagtgaagtactcacggctggccaagtacttcttcaataaagaaggggattttaacaacctgacagctgcagcatttcataagaagtctcacctcttggtcactggctttgcttctggaatcttccatcttcatgagctgccagagtttaacctcatccactccctgagcatttcagatcagagcatcgcctcagtggccatcaatagctcgggggactggattgcttttggctgttcaggcctgggccagctgctggtgtgggagtggcagagtgagtcctacgtgctcaagcagcagggccacttcaacagcatggtggccctggcctactcgcccgacggacagtacatcgtgactggcggggacgacggcaaggtcaaggtgtggaacaccctcagcggcttctgcttcgtcacttttacggagcactccagcggggtgaccggtgtgacctttactgccaccggctacgttgtggtgacctcatccatggacgggaccgtgcgagcctttgaccttcacaggtaccgaaacttccgcaccttcacctctccacgccccacccagttctcctgtgtggcggtggatgcgagcggtgagatcgtctctgcaggggcgcaggactcctttgagattttcgtgtggtccatgcagacaggcaggctccttgatgttttgtctggacacgaagggcccatcagtggtctgtgttttaacccaatgaagtccgtcctggccagtgcctcctgggacaagacagtgcgcctatgggacatgtttgacagctggaggaccaaggagacgctggccctgacctctgatgctctggctgtgacttttcgccctgatggtgcggagctggctgtggccacactgaactcacagatcaccttctgggaccctgagaacgcggtgcagacgggctccattgagggcaggcatgacctcaagactggcaggaaggagctggacaagattacagccaagcacgcggccaaggggaaggccttcaccgccctgtgctactctgcagacggccacagcatcctggcgggaggcatgtccaagttcgtgtgcatctaccacgtccgtgagcagattctcatgaagaggttcgagatctcttgcaacctgtctttggacgccatggaggaatttttgaaccgaagaaaaatgacagagtttggcaacctggcactaattgatcaggatgctgggcaggaggatggagtcgcgataccactgccaggcgtcaggaaaggtgacatgagttctcggcacttcaaacctgagatcagggtgacctcactccgcttctctcccactgggcgctgctgggcggccaccaccacggagggactcctcatctactccctggacacccgcgtgctctttgacccgtttgagctggacaccagcgtcacccccgggagggtgcgcgaggcactgcgccagcaggacttcaccagggccatcctcatggccctccggctcaacgagagcaaactggtgcaggaggccctggaggcggtgcccaggggcgagattgaagtggtcacctcctcccttcctgaactgtatgtggagaaagtgctggagtttttagcttcctcctttgaagtgtctcgccacctggaattctacctcctctggactcacaaactgctcatgttgcacggacagaagctgaagtccagagccgggacgctgctgcctgtcattcagttcctccagaagagcatccagcggcacctggacgacctgtcgaaactctgtagctggaaccactataacatgcagtacgcactagcagtttccaagcagcggggcacaaaacgctccctagacccgctgggaagtgaggaggaggcagaagcatctgaagatgacagcctgcatctgcttggaggaggaggcagagactcagaagaagagatgctggcctagagccagccggttgcagcgttggattgtgccggctaagacctgccagggagatgggacccttgtgccacctgggccagcaaagaggaggggtccagagaacagctgaaatactgtcactagtggtagtgacttgcttttcctgtgcacacatgtagcccatcaggacagcgagccgacgggtcacgccaggggccggcacgcactggcacctggccccaggagcggggccgtgtgaacggtgatgaatgttgaaaatgcgtctcagagaggtattcacatgaactttgtatgagacttatttatatctttaacataaaggtttgataaagaacttagggattaaaaaaaagatggagttttctaacgtgaggatgaagtctacacttcagattaaaaagggttatgttgta

SEQ ID NO: 5911 - DNA, 1705 bp, Homo sapiens
cccatctccacccctcccctgaaccccactccccactgaggtccccaaaccccacccctcactccaccctgagggccccatcctctgaaccccaatcccccagccccactgagctcttaaccctccccacctgagggttccctttccctgcccgtcccccagcttcctagctccccaccccaagtgaccccccgcagctcctcgcccctcccactgcaaaccggcactgaagggctgccccgcccccgcccctccccgcccccgcgggacacgcccagattctttgcccccatagcctggtgacctctggccacccgctgtcccaggtgggcctggatccttccagctcattctttgcctgcgccgtccctcgttccatggcccagtcctccccggggaccctgagcctggaagccccggaccactggaaccttgaacccaccagctggctgtacccggagccgtggcagcagccctcatccccatggcggccatcccagccctggacccagaggccgagcccagcatggacgtgattttggtgggatccagtgagctctcaagctccgtttcacccgggacaggcagagatcttattgcatatgaagtcaaggctaaccagcgaaatatagaagacatctgcatctgctgcggaagtctccaggttcacacacagcaccctctgtttgagggagggatctgcgccccatgtaaggacaagttcctggatgccctcttcctgtacgacgatgacgggtaccaatcctactgctccatctgctgctccggagagacgctgctcatctgcggaaaccctgattgcacccgatgctactgcttcgagtgtgtggatagcctggtcggccccgggacctcggggaaggtgcacgccatgagcaactgggtgtgctacctgtgcctgccgtcctcccgaagcgggctgctgcagcgtcggaggaagtggcgcagccagctcaaggccttctacgaccgagagtcggagaatccccttgagatgttcgaaaccgtgcctgtgtggaggagacagccagtccgggtgctgtccctttttgaagacatcaagaaagagctgacgagtttgggctttttggaaagtggttctgacccgggacaactgaagcatgtggttgatgtcacagacacagtgaggaaggatgtggaggagtggggacccttcgatcttgtgtacggcgccacagctcccctgggccacacctgtgaccgtcctcccagctggtacctgttccagttccaccggttcctgcagtacgcacggcccaagccaggcagccccaggcccttcttctggatgttcgtggacaatctggtgctgaacaaggaagacctggacgtcgcatctcgcttcctggagatggagccagtcaccatcccagatgtccacggcggatccttgcagaatgctgtccgcgtgtggagcaacatcccagccataaggagcagcaggcactgggctctggtttcggaagaagaattgtccctgctggcccagaacaagcagagctcgaagctcgcggccaagtggcccaccaagctggtgaagaactgctttctccccctaagagaatatttcaagtatttttcaacagaactcacttcctctttataaatgagtcactatactgtgaagaaaaagacttttcctagaacaaaggcaactttcctc

SEQ ID NO: 5912 - protein, 387 aa, Homo sapiens [sequence omitted]

SEQ ID NO: 5913 - DNA, 3384 bp, Homo sapiens
gcgacgcggcgcaggcggcgggagtgcgagctgggcccgtgtttcggccgccgccatggccgcggtggacctggagaagctgcgggcgtcgggcgcgggcaaggccatcggcgtcctgaccagcggcggcgacgcgcaaggtcccctgacaagcccaccaggccccctgctgagatggctgtgaccctgggctgacccgcccagtggcacattgactccgcctggagctggggagaccagagaggccctgtggttggacggtggcctgggtgcgctgctcctgccctctccttgccctgcctcagctgctgcctgccagaggcgtggcacctcacctcacacctgctccctgctgctgagccccacgccaagctggagagcggatgagaagcatgtgtaaccagggtagaggtcgagagtcctctcgtgggggtctccatgttcaagggagctgccgaggcttgagcaggagcccccagcaggaaactggctttgccaaggcccccgctgggacagactgtttctttcactgcagtcctgggagccgagggcaaggggacaggaaagaggaagtgacctcagagcctggtggcaccagcatcatgtccaggctggggggcatgaacgctgctgtccgggctgtgacgcgcatgggcatttatgtgggtgccaaagtcttcctcatctacgagggctatgagggcctcgtggagggaggtgagaacatcaagcaggccaactggctgagcgtctccaacatcatccagctgggcggcactatcattggcagcgctcgctgcaaggcctttaccaccagggaggggcgccgggcagcggcctacaacctggtccagcacggcatcaccaacctgtgcgtcatcggcggggatggcagccttacaggtgccaacatcttccgcagcgagtggggcagcctgctggaggagctggtggcggaaggtaagatctcagagactacagcccggacctactcgcacctgaacatcgcgggcctagtgggctccatcgataacgacttctgcggcaccgacatgaccatcggcacggactcggccctccaccgcatcatggaggtcatcgatgccatcaccaccactgcccagagccaccagaggaccttcgtgctggaagtgatgggccggcactgcgggtacctggcgctggtatctgcactggcctcaggggccgactggctgttcatccccgaggctccacccgaggacggctgggagaacttcatgtgtgagaggctgggtgagactcggagccgtgggtcccgactgaacatcatcatcatcgctgagggtgccattgaccgcaacgggaagcccatctcgtccagctacgtgaaggacctggtggttcagaggctgggcttcgacacccgtgtaactgtgctgggccacgtgcagcggggagggacgccctctgccttcgaccggatcctgagcagcaagatgggcatggaggcggtgatggcgctgctggaagccacgcctgacacgccggcctgcgtggtcaccctctcggggaaccagtcagtgcggctgcccctcatggagtgcgtgcagatgaccaaggaagtgcagaaagccatggatgacaagaggtttgacgaggccacccagctccgtggtgggagcttcgagaacaactggaacatttacaagctcctcgcccaccagaagccccccaaggagaagtctaacttctccctggccatcctgaatgtgggggccccggcggctggcatgaatgcggccgtgcgctcggcggtgcggaccggcatctcccatggacacacagtatacgtggtgcacgatggcttcgaaggcctagccaagggtcaggtgcaagaagtaggctggcacgacgtggccggctggttggggcgtggtggctccatgctggggaccaagaggaccctgcccaagggccagctggagtccattgtggagaacatccgcatctatggtattcacgccctgctggtggtcggtgggtttgaggcctatgaaggggtgctgcagctggtggaggctcgcgggcgctacgaggagctctgcatcgtcatgtgtgtcatcccagccaccatcagcaacaacgtccctggcaccgacttcagcctgggctccgacactgctgtaaatgccgccatggagagctgtgaccgcatcaaacagtctgcctcggggaccaagcgccgtgtgttcatcgtggagaccatggggggttactgtggctacctggccaccgtgactggcattgctgtgggggccgacgccgcctacgtcttcgaggaccctttcaacatccacgacttaaaggtcaacgtggagcacatgacggagaagatgaagacagacattcagaggggcctggtgctgcggaacgagaagtgccatgactactacaccacggagttcctgtacaacctgtactcatcagagggcaagggcgtcttcgactgcaggaccaatgtcctgggccacctgcagcagggtggcgctccaaccccctttgaccggaactatgggaccaagctgggggtgaaggccatgctgtggttgtcggagaagctgcgcgaggtttaccgcaagggacgggtgttcgccaatgccccagactcggcctgcgtgatcggcctgaagaagaaggcggtggccttcagccccgtcactgagctcaagaaagacactgatttcgagcaccgcatgccacgggagcagtggtggctgagcctgcggctcatgctgaagatgctggcacaataccgcatcagtatggccgcctacgtgtcaggggagctggagcacgtgacccgccgcaccctgagcatggacaagggcttctgaggccagccatgcccacgcccctccccagcccccacccatgccagcgcagcgccagggctcagatggggcctgggctgttgtgtctggagcctgcaggcaggtgggggctgcgtccctgctcagcccatcccctgcctctatccctggccacctgccaggcctccctcgggctggtgtcttgagaccagcctgccaggccctccagcaggaggacagagtgccctggggcatccaccttcctgcccaggggacgtggcgctgtcggtgtttggaggctgctgccccctggctttggcgccccatgggccctcagcgtctccccatgctgggctcactacatgggccagcccttgctctacctggccggtaggctgctggcgcctaggttgtgttgagagggggatgcccctggccctgcctcactgtgacctgctcctgcccacgtgcagcacctgtcaccttttctagaaataaaatcaccctgactgtggggtgcatcggtctccgg

SEQ ID NO: 5914 - DNA, 2195 bp, Homo sapiens
gtggcacgggcagggcccagtgcacagggatctgggcatggcgaggggatgagaagctgtggatacaagcccaggacatggggtggccccgcgggggctgggaaggctggcagatgttgggtgtgggtaccacccccctgcaggcgtcctggcggccgggtcaggctggattggacgtctgggttcccatgcgtgcctccacccgctaccaaggtggccaaccctcccttgagctggatgccggccacgtgctttgctgcacgggctggcgtggcctcgtgttgtgttgggggtctcgcaccttctgtggaaggtgccctgcctggcatgcgcggtgtctgctgcctcatggctgagcttccatcgggccgtgtgcctgtgaccagcctcctgggctctgtcacggctgcgctgtggctgtacgccgtggcgctgcagggctgtgcatggtgtgacccgaatcccttccaggagcttcgagaacaactggaacatttacaagctcctcgcccaccagaagccccccaaggagaagtctaacttctccctggccatcctgaatgtgggggccccggcggctggcatgaatgcggccgtgcgctcggcggtgcggaccggcatctcccatggacacacagtatacgtggtgcacgatggcttcgaaggcctagccaagggtcaggtgcaagaagtaggctggcacgacgtggccggctggttggggcgtggtggctccatgctggggaccaagaggaccctgcccaagggccagctggagtccattgtggagaacatccgcatctatggtattcacgccctgctggtggtcggtgggtttgaggcctatgaaggggtgctgcagctggtggaggctcgcgggcgctacgaggagctctgcatcgtcatgtgtgtcatcccagccaccatcagcaacaacgtccctggcaccgacttcagcctgggctccgacactgctgtaaatgccgccatggagagctgtgaccgcatcaaacagtctgcctcggggaccaagcgccgtgtgttcatcgtggagaccatggggggttactgtggctacctggccaccgtgactggcattgctgtgggggccgacgccgcctacgtcttcgaggaccctttcaacatccacgacttaaaggtcaacgtggagcacatgacggagaagatgaagacagacattcagaggggcctggtgctgcggaacgagaagtgccatgactactacaccacggagttcctgtacaacctgtactcatcagagggcaagggcgtcttcgactgcaggaccaatgtcctgggccacctgcagcagggtggcgctccaaccccctttgaccggaactatgggaccaagctgggggtgaaggccatgctgtggttgtcggagaagctgcgcgaggtttaccgcaagggacgggtgttcgccaatgccccagactcggcctgcgtgatcggcctgaagaagaaggcggtggccttcagccccgtcactgagctcaagaaagacactgatttcgagcaccgcatgccacgggagcagtggtggctgagcctgcggctcatgctgaagatgctggcacaataccgcatcagtatggccgcctacgtgtcaggggagctggagcacgtgacccgccgcaccctgagcatggacaagggcttctgaggccagccatgcccacgcccctccccagcccccacccatgccagcgcagcgccagggctcagatggggcctgggctgttgtgtctggagcctgcaggcaggtgggggctgcgtccctgctcagcccatcccctgcctctatccctggccacctgccaggcctccctcgggctggtgtcttgagaccagcctgccaggccctccagcaggaggacagagtgccctggggcatccaccttcctgcccaggggacgtggcgctgtcggtgtttggaggctgctgccccctggctttggcgccccatgggccctcagcgtctccccatgctgggctcactacatgggccagcccttgctctacctggccggtaggctgctggcgcctaggttgtgttgagagggggatgcccctggccctgcctcactgtgacctgctcctgcccacgtgcagcacctgtcaccttttctagaaataaaatcaccctgactgtggggtgcatcggtctccgg

SEQ ID NO: 5915 - DNA, 2114 bp, Homo sapiens
ccgcgcagtcgtcacccgcccgggatcaggaggccgggggcgcccgccggtcgggcctgggcggccgcatgaagctgacgcggaagatggttctgacccgagccaaggcctcggagctgcacagcgtgcgcaagctcaactgctggggcagccgcctcacagatatctccatttgccaggagatgcccagcctggaggtgatcacgctcagtgtcaacagcatctccaccctggagcctgtgagccggtgccagcgcctgagtgagctgtacctgcggaggaaccgcatccccagcctggctgagctcttctacctgaaggggctgccgcgtctgcgggtgctgtggctggccgagaacccgtgctgcggcaccagcccccaccgctaccgcatgaccgtgctgcgcaccctgccgcgcctacagaagctggacaaccaggctgtgacggaggaggagctgtcccgtgcactgagtgagggagaggagatcactgcggccccagagagagagggcacaggccacggcggccccaagctatgctgcacactgagctccctcagctccgctgctgagactggccgggacccgctggacagcgaggaggaggcaaccagcggcgcccaggatgaacgtggcctgaagccgccttcccggggccagtttccttccctctcagccagggatgcctcgagcagccacaggggcaggaacgtcctgactgccatcctgctgctgctgcgggagctggatgcagaggggctggaggccgtgcagcagactgtgggcagccggctgcaggccctgcgtggggaagaggtgcaggagcacgccgagtgaccgcaggacctgaacgccgctccagcctccacggggaccccagcgtcttccccagcccccgggagctggagggtggctgccatggccgcagccccggccccacacaaaagcctccccggtttgccacatcggccgagggcaggagtgggtgttaggtactggctaaccggggcggtggagatgcctgtctacaccagtcctgtccccaggactccccttctgtggtctggaggttctaggctggcctgggctcttaaagggaggattttgcaggctgtcctccctaataaaagattttcccaaggttgatctggaggtgacgtttcccaaggcatggttgtgacagtcttcctgaaagcaagggccgtttctccacagaatgaggaggtcttcacggatggctttgccgattccagcccttggtccttggatagatttctgttgggcaagggagacttcgagaatgctggcacccatagcgacatctgccctgagctgctcagcaggcaggcagcagcctcccgcacccatgggagagagttttgttttcttggccgggctgggcaggtgcgccttcctttctctctcctgtgaagaactgcaggagggccctcagctgtgaggttgtggatgaacaggcctgttcgccctggggtccgggcctggcacaggaagcagctagactaggggagtccttggagcatctgagaggggttttctttcctctgggaagagtcgcaagtcttatgaggatgccacaatctgggcagtgacccgtggccctggggaccttcctagtgccccccaaaaccaaggaagcattcacgtgagatggggagtcagccttccagctggtgtgtaggaaagccaggtccctgggcccttgtcccatgtggggttgagatccagatctccatgagatattcccatcctccgccgagcggtgatgcgtgaccgtgtgtgcaggccgctgttctcccaagctcggggccatgccgtgccaccgtcaccagagccagctgcagcactggggcagccactgtcgccggacttggggaagcccagggtgaagacagtcactcatccgtgcaagctctccagaagggatgcaagctctccagaaggggtgtgatctctgagcagtggggagtggagtcaccactcgggacatagagggtggacagttcaggcctgtgtctgcctccttgggactgtggagtgggtgccctcagtaaagcgctttgttggaatggtaaaaaaaaaaaaaaaaaaaaa

SEQ ID NO: 5916 - protein, 256 aa, Homo sapiens
MKLTRKMVLTRAKASELHSVRKLNCWGSRLTDISICQEMPSLEVITLSVNSISTLEPVSRCQRLSELYLRRNRIPSLAELFYLKGLPRLRVLWLAENPCCGTSPHRYRMTVLRTLPRLQKLDNQAVTEEELSRALSEGEEITAAPEREGTGHGGPKLCCTLSSLSSAAETGRDPLDSEEEATSGAQDERGLKPPSRGQFPSLSARDASSSHRGRNVLTAILLLLRELDAEGLEAVQQTVGSRLQALRGEEVQEHAE

SEQ ID NO: 5917 - DNA, 2878 bp, Homo sapiens
cgcgcggctgaggcgaggtcgctcggcgcagctgttgcggggccatggcggggaccgcgctcaagaggctgatggccgagtacaaacaattaacactgaatcctccggaaggaattgtagcaggccccatgaatgaagagaacttttttgaatgggaggcattgatcatgggcccagaagacacctgctttgagtttggtgtttttcctgccatcctgagtttcccacttgattacccgttaagtcccccaaagatgagatttacctgtgagatgtttcatcccaacatctaccctgatgggagagtctgcatttccatcctccacgcgccaggcgatgaccccatgggctacgagagcagcgcggagcggtggagtcctgtgcagagtgtggagaagatcctgctgtcggtggtgagcatgctggcagagcccaatgacgaaagtggagctaacgtggatgcgtccaaaatgtggcgcgatgaccgggagcagttctataagattgccaagcagatcgtccagaagtctctgggactgtgagacctggcctcgcacaggcgcgcacacaccgccaagcagctcagcattctcccccggcacacttagtgacagtgatgctctgtgctggtaccaaacaaggcagacttgcaagaaccatggcatcttttttttttttcaaacctttcctacttcaaacaggcttctcttctgaaatgatgacttaatgtcgaatattgacagcttactgcagttttacagtattcctcacaaagggcttcaggtagattatcagagctgtcagcactacctctccccgctgaaaccagcagttcatggcttcctgtggattccctccctccctggagtgttgagggggttgtacctgccagacttccaggggacgatggaatacccagaacgctccttctgaagaaatggggccctgtagctgcagcacaggggaagggcccggcaccctttctgggtccttcctggttccctgtgggccccatgaggagtccattacttcctttcttccttcatattttacaggcagatgcttttcttataatctaattacatcttttcatttgttatatattacaaaccatcacacttagaaatacttccaggaaatgcttttttgaagtgtgaattaataagaaatggggtaaatagaaaagaaatttattgctgattggccaggtgcggtggttcgtgcctgtaatcccagctctttgggaggccaaggcaggtagatcacaaggtcaggaaattgagaccatcctggctaatacagtgaaaccccatgtctgctaaaattacaaaaaattagctgggcgtggtggtgcacgcctgtagtctcagctactcaggaggctgaggcaggagaatcgcttgaacccgggaggcagaggtagcagtgagctgaagtcccgccactgcactccagcctgggcaacagagcgagactcagtctcaaaaagaaaaaagaaatttattgctgatcacaaggacagacagttttttcccgaccatactcatcaaagatttacgtttgtatattagtaactagtgcattactagagcaggtgcaggtgaggtctttaaagtttcaatgaaagtttcttctggatctacagaaaaaatttttttttttcaatctaaaaactggaaattctagggtttttgtacattttggatgcactgggaatttattagcacaaaatcattctttgcaactcaaaattcagaagggactctaccatatcttagctcagagcacagaggagtgccttatccccacacttgactgggctgtggaggtgggcatgtgggcccctgggcccaggctggggacagagcccttgttttgtgacttaggattttgatgtggttcccatgttctctaacagggccagctgagcagcacaggccaggaggccacagtgtaagcaataacagatctgccacatgcagaagcaaatatcaggcctgtcgcacacgggcggcatttaaataggaatttctatttttgaaataagggatggtctatgaggcatacagtagatttgatgtgatccttttctccctcccttccataatggatcgtggtctgtgtgactgaacccacacagagtgtcatgggtgacagtttctggttgaagtagctccacgcctggcttctgtggacagcagattcttttccttctcacaaggggctcatttaaaatttggaggctgggtgctgtggctcacgcctgcaatcccagcactttgggagactgaggcgggcggatcatgaggtcaggagatcgcgaccatcctggctaacagtgaaaccctgtctccactaaaaatacaaaaaattagccgggcgtggtggcgggcgcctgtagtcccagctactctgaagactgaggcaggagaatggcgtgaacccaggaggcggagcttgcagtgagctgagatcacgccactgcactccagcctgggcaacagagtgagactctgtctcaaaaaaaaaaaaaaaaaaaatggaacgcagggcaagaactcgtatttggaaggagatgggggaaaggagcggtattatacctatgttgtatttgcaggcaaatgagatggagccctctctgtaaagaagagtcatttgtgcaagtagacggggtctgtgggtgcaggccctggaggggcacacaattgcctggaggcttctgtgagatcgggagagggaggagaggcagtctcttgacaaaataaagtatttttattcatttgtatttattaaatgaaaaaacaatcccatggtgtccctgttgtgtggtggaacctaatgactgttgaaataaagttctgtgttttccctgccctgc

SEQ ID NO: 5918 - protein, 165 aa, Homo sapiens
MAGTALKRLMAEYKQLTLNPPEGIVAGPMNEENFFEWEALIMGPEDTCFEFGVFPAILSFPLDYPLSPPKMRFTCEMFHPNIYPDGRVCISILHAPGDDPMGYESSAERWSPVQSVEKILLSVVSMLAEPNDESGANVDASKMWRDDREQFYKIAKQIVQKSLGL

SEQ ID NO: 5919 - DNA, 1799 bp, Homo sapiens
agccacgtgacccccgtgccggccaacgggtgcgccgggatttgggggataaagcgcggccccgcgcacagttgcggcgggagagcggcggggccgagagcgtgactcgcccgctccgcgctgcttcccccgcgccgcctccccgcgccgctcgcgcagccatgtccgaggagaagcccaaggagggtgtgaagacagagaatgaccacatcaacctgaaggtggccgggcaggacggctccgtggtgcagttcaagatcaagaggcacacgccgctgagcaagctgatgaaggcctactgcgagaggcagggcttgtcaatgaggcagatcagattcaggttcgacgggcagccaatcaatgaaactgacactccagcacagctggagatggaggacgaggacaccatcgacgtgttccagcagcagacgggaggtgtgccggagagcagcctggcagggcacagtttctagagggcccgtccccagcccgggccgtccatcctcgcattgctgttgaatggtgagcacgtgaccatgccgaccacaaaggtgtctgcggaaactcgaggacattcaccacgatgattttcctctctttgatgtacttcaagtgcaactcaaaactatatctgcagggatgaatctgtaacttaaattgggccaatcagaattgttatctttgttcaggtaaaatgagttgcaagatattgtgggtacttttgtgtgctcatttgtgttttccccccctcctacaacatttttttaaccccaaaattatagcctgaatgttcgcttttagtctggccagggatctgactcctgagttggttgcctctcccctgctcactccagtcacatagagaattggtgtttcccgcagtggggatgcagctgttggacaggtattgggggcaaggttggtagggaggacagactgtcacttgctgttacaggcacaggtgattaaaatgctaaatattgcaaatttaagctttgtcagtatatggaaaagttgaagggaaaatactggaatgcttcttcaaaggttaaaaaataaccgagtcttttggtaatttgaccccacgtgctctctggccctcaagcatgtaacctcggggtctgaggcccaggacccacccccctgccacccctcccaccccactccctgctcagtacctggcgttggtacacaggcaaggattggcacaaccaaaattggcctttttctccctcttaatattgaagaaattcccacatttctcatttggtaatggtgttgtggcctcagatttcttctagtatttgcttctgatgaatgattatggtctatacataaaaaagtaagactaagtattgctgaatttgcagttatgttgtcgtgtataagagctacttccaagtgtggttacaaatgaacccatggaatgatgacttcatgttcttctcgtgggtttgtgccgtgctgctttccaaataggtattgaatttatgcattagtctggtgatttcagttctgtgaaatattttgggatctataccaattaaacattttcatagttctgcctattgtccttccctgaggctccattgctgcttggtggccattctctgcctttttacagtcacctgaacaatgacccatcatctcttgcttgcttgaaatcttgctgaaatgttctcatttcctgtttgctgtatgggctcgggtgggatgtttgttggctctgttgtgtttattcaccaatttgtacattatttgttgtcctttactactgtaaacagtaaatatagtttggt

SEQ ID NO: 5920 - protein, 103 aa, Homo sapiens
MSEEKPKEGVKTENDHINLKVAGQDGSVVQFKIKRHTPLSKLMKAYCERQGLSMRQIRFRFDGQPINETDTPAQLEMEDEDTIDVFQQQTGGVPESSLAGHSF

SEQ ID NO: 5921 - DNA, 2737 bp, Homo sapiens
ctgaacctcagccgcgccgggaggcgagcccgttggcgaggggcggggcagatggcgagggagcggggcgagctgctttttgaggctgcgcactcgcatggccccacctcgcaggtccacttccggcgccgcggctgttccgggcggagaccgcttgtgctggagtcggagttgtaacgctccactgactgatagagcgaccggccgaccatggcgcccggagtggcccgcgggccgacgccgtactggaggttgcgcctcggtggcgccgcgctgctcctgctgctcatcccggtggccgccgcgcaggagcctcccggagctgcttgttctcagaacacaaacaaaacctgtgaagagtgcctgaagaacgtctcctgtctttggtgcaacactaacaaggcttgtctggactacccagttacaagcgtcttgccaccggcttccctttgtaaattgagctctgcacgctggggagtttgttgggtgaactttgaggcgctgatcatcaccatgtcggtagtcgggggaaccctcctcctgggcattgccatctgctgctgctgctgctgcaggaggaagaggagccggaagccggacaggagtgaggagaaggccatgcgtgagcgggaggagaggcggatacggcaggaggaacggagagcagagatgaagacaagacatgatgaaatcagaaaaaaatatggcctgtttaaagaagaaaacccgtatgctagatttgaaaacaactaaagcgctccagcacatcagtcccgacgcttcctgtgaggtgcacgctccgcagcccagcccagccgggagaccacgtggccattgcggtctcctgaccttggccagtgaacctgccagccttccaggacaggcggccggagagctgcccctgaaggacagtcctctcgtcttgcagactggtgaccttctattccctgttcatctctgtttctagatttagtcacttgaaataagaaatctttggggtttgggcttttttatactcttctcagtttgtgaaacgctaactgcacacgaagccgcctgacggcacccagcgctgtggctgtcattctcccagggcagaaccctgcgtttctctctgtccactaacaagcttcacacgcaacacagggaagtcggtttgacttttgtcatgaggagaactgaccagccctcatcattccccataaaaccacggacagcgtctgtgtgcgcatcttgagtcttcacacctgttgactcacacggcttttgctgatgacacggggctccagtacacagtctgataaggacttaacgtcctaacctcaattgtattaaatagcattggggaatagctaaacctttttaaaaaaatttattggattttcctccctgcttaaaagatttcaccagaaaaccttcatataaaaattcaggccctttttggacaatttttaaaatttgtatctttactagaacatgagaatctttttcccttggaagcttgaattataaatgtggtgtttggcctgcctcagcagcaccagttgactgctcgtgtgccagcggtgtggggaggacggggcaggacgctgcagctctctccagccctgttggcatcctcagtgcctgcaggcctctcgctgcctgttgggctgtctggggggtggccatttagggatcgtggggacggggtccaccccaagaagaaagaaaggcccgtccacaggcccggctctgggccacgtgccccggaagcaggtgtgtccagagtcagctgagggctctccccacaccacccagcaggcgctggtgctccttctgcctcatgggaccagtccagcttccagccgctctggctcgagggtggtctgagcacttccttctgagtgggcttctctgggagctctccagtggcactgctggacctgcccacgtttctgtaaaatcaggatacgtggctttagtaagcagaccaagcgcttcgtggcagggaaagcagcgtgcggggaagtcactgaaaagtgctgcctaaggaagtttggaaatagtccccgttccagattgccttgaattttaaaacattttgctttgggaaagtaggtcagcagcacctaagatcaaggatgcgttccattttcacacttcacagtcatgaaaactgagaagactgtcttcagcgtgaactaaagttcacaggcagatcactgatccagaacacttcaagaactcgtcaaacagctcgataagcctttttgactgtgtacatctgtaccgggaataacattcctaggctgaaatttccacaaagaatagaacctgtacccagttcttcaggctgatttccctgacctcttgggcatttgtatttgtagtaaagtattgcagagattcctaagtattttatagcagccatcaaaattggactttgtattgtttattcataaaagacacttggtaatagacttcagtgaactctgtatgaatgcagtagtgtgcgtgcaaaatccgcttcctgagcgtagggtgctgagctggcgctagggctcggttgtgaaatacagcgtagtcagcccttgcgctcagtgtagaaacccacgtctgtaaggtcggtcttcgtccatctgcttttttctgaaatacactaagagcagccacaaaactgtaacctcaaggaaaccataaagcttggagtgccttaatttttaaccagtttccaataaaacggtttactacctga

SEQ ID NO: 5922 - protein, 180 aa, Homo sapiens
MAPGVARGPTPYWRLRLGGAALLLLLIPVAAAQEPPGAACSQNTNKTCEECLKNVSCLWCNTNKACLDYPVTSVLPPASLCKLSSARWGVCWVNFEALIITMSVVGGTLLLGIAICCCCCCRRKRSRKPDRSEEKAMREREERRIRQEERRAEMKTRHDEIRKKYGLFKEENPYARFENN

SEQ ID NO: 5923 - DNA, 2844 bp, Homo sapiens
tgtcaggactttacgacccgcgcctccagctgaggtttctagacgtgacccagggcagactggtagcaaagcccccacgcccagccaggagcaccgccgaggactccagcacaccgagggacatgctgggcctgcgccccccactgctcgccctggtggggctgctctccctcgggtgcgtcctctctcaggagtgcacgaagttcaaggtcagcagctgccgggaatgcatcgagtcggggcccggctgcacctggtgccagaagctgaacttcacagggccgggggatcctgactccattcgctgcgacacccggccacagctgctcatgaggggctgtgcggctgacgacatcatggaccccacaagcctcgctgaaacccaggaagaccacaatgggggccagaagcagctgtccccacaaaaagtgacgctttacctgcgaccaggccaggcagcagcgttcaacgtgaccttccggcgggccaagggctaccccatcgacctgtactatctgatggacctctcctactccatgcttgatgacctcaggaatgtcaagaagctaggtggcgacctgctccgggccctcaacgagatcaccgagtccggccgcattggcttcgggtccttcgtggacaagaccgtgctgccgttcgtgaacacgcaccctgataagctgcgaaacccatgccccaacaaggagaaagagtgccagcccccgtttgccttcaggcacgtgctgaagctgaccaacaactccaaccagtttcagaccgaggtcgggaagcagctgatttccggaaacctggatgcacccgagggtgggctggacgccatgatgcaggtcgccgcctgcccggaggaaatcggctggcgcaacgtcacgcggctgctggtgtttgccactgatgacggcttccatttcgcgggcgacgggaagctgggcgccatcctgacccccaacgacggccgctgtcacctggaggacaacttgtacaagaggagcaacgaattcgactacccatcggtgggccagctggcgcacaagctggctgaaaacaacatccagcccatcttcgcggtgaccagtaggatggtgaagacctacgagaaactcaccgagatcatccccaagtcagccgtgggggagctgtctgaggactccagcaatgtggtccaactcattaagaatgcttacaataaactctcctccagggtcttcctggatcacaacgccctccccgacaccctgaaagtcacctacgactccttctgcagcaatggagtgacgcacaggaaccagcccagaggtgactgtgatggcgtgcagatcaatgtcccgatcaccttccaggtgaaggtcacggccacagagtgcatccaggagcagtcgtttgtcatccgggcgctgggcttcacggacatagtgaccgtgcaggttcttccccagtgtgagtgccggtgccgggaccagagcagagaccgcagcctctgccatggcaagggcttcttggagtgcggcatctgcaggtgtgacactggctacattgggaaaaactgtgagtgccagacacagggccggagcagccaggagctggaaggaagctgccggaaggacaacaactccatcatctgctcagggctgggggactgtgtctgcgggcagtgcctgtgccacaccagcgacgtccccggcaagctgatatacgggcagtactgcgagtgtgacaccatcaactgtgagcgctacaacggccaggtctgcggcggcccggggagggggctctgcttctgcgggaagtgccgctgccacccgggctttgagggctcagcgtgccagtgcgagaggaccactgagggctgcctgaacccgcggcgtgttgagtgtagtggtcgtggccggtgccgctgcaacgtatgcgagtgccattcaggctaccagctgcctctgtgccaggagtgccccggctgcccctcaccctgtggcaagtacatctcctgcgccgagtgcctgaagttcgaaaagggcccctttgggaagaactgcagcgcggcgtgtccgggcctgcagctgtcgaacaaccccgtgaagggcaggacctgcaaggagagggactcagagggctgctgggtggcctacacgctggagcagcaggacgggatggaccgctacctcatctatgtggatgagagccgagagtgtgtggcaggccccaacatcgccgccatcgtcgggggcaccgtggcaggcatcgtgctgatcggcattctcctgctggtcatctggaaggctctgatccacctgagcgacctccgggagtacaggcgctttgagaaggagaagctcaagtcccagtggaacaatgataatccccttttcaagagcgccaccacgacggtcatgaaccccaagtttgctgagagttaggagcacttggtgaagacaaggccgtcaggacccaccatgtctgccccatcacgcggccgagacatggcttgccacagctcttgaggatgtcaccaattaaccagaaatccagttattttccgccctcaaaatgacagccatggccggccgggtgcttctgggggctcgtcggggggacagctccactctgactggcacagtctttgcatggagacttgaggagggagggcttgaggttggtgaggttaggtgcgtgtttcctgtgcaagtcaggacatcagtctgattaaaggtggtgccaatttatttacatttaaacttgtcagggtataaaatgacatcccattaattatattgttaatcaatcacgtgtatagaaaaaaaataaaacttcaatacaggctgtccatgg

SEQ ID NO: 5924 - DNA, 5774 bp, Homo sapiens
agctccagccgcactgccccgatggctccctacccctgtggctgccacatcctgctgctgctcttctgctgcctggcggctgcccgggccaacctgctgaacctgaactggctttggttcaataatgaggacaccagccatgcagctaccacgatccctgagccccaggggcccctgcctgtgcagcccacagcagataccaccacacacgtgaccccccggaatggttccacagagccagcgacagcccctggcagccctgagccaccctcagagctgctggaagatggccaggacacccccacttctgccgagagcccggacgcgccagaggagaacattgccggtgtcggagccgagatcctgaacgtggccaaaggcatccggagcttcgtccagctgtggaatgacactgtccccactgagagcttggccagggcggaaaccctggtcctggagactcctgtgggcccccttgccctcgctgggccttccagcaccccccaggagaatgggaccactctctggcccagccgtggcattcctagctctccgggcgcccacacaaccgaggctggcaccttgcctgcacccaccccatcgcctccctccctgggcaggccctgggcaccactcacggggccctcagtgccaccaccatcttcagagcgcatcagcgaggaggtggggctgctgcagctccttggggaccccccgccccagcaggtcacccagacggatgaccccgacgtcgggctggcctacgtctttgggccagatgccaacagtggccaagtggcccggtaccacttccccagcctcttcttccgtgacttctcactgctgttccacatccggccagccacagagggcccaggggtgctgttcgccatcacggactcggcgcaggccatggtcttgctgggcgtgaagctctctggggtgcaggacgggcaccaggacatctccctgctctacacagaaccaggtgcaggccagacccacacagccgccagcttccggctccccgccttcgtcggccagtggacacacttagccctcagtgtggcaggtggctttgtggccctctacgtggactgtgaggagttccagagaatgccgcttgctcggtcctcacggggcctggagctggagcctggcgccgggctcttcgtggctcaggcggggggagcggaccctgacaagttccagggggtgatcgctgagctgaaggtgcgcagggacccccaggtgagccccatgcactgcctggacgaggaaggcgatgactcagatggggcatccggagactctggcagcgggctcggggacgcccgggagcttctcagggaggagacgggcgcggccctaaaacccaggctccccgcgccaccccccgtcaccacgccacccttggctggaggcagcagcacggaagattccagaagtgaagaagtcgaggagcagaccacggtggcttcgttaggagctcagacacttcctggctcagattctgtctccacgtgggacgggagtgtccggacccctgggggccgcgtgaaagagggcggcctgaaggggcagaaaggggagccaggtgttccggcagggcctccggggagggacggcacccctggaagggacggcgagccgggcgaccccggtgaagacggaaagccgggcgacaccgggccacaaggcttccccgggactccaggggacgtaggtcccaagggcgacaagggagaccctggggttggagagagagggcccccaggaccccaagggcctccagggcccccaggaccctccttcagacacgacaagctgaccttcattgacatggagggatctggcttcgggggcgatctggaggccctgcggggtcctcgaggcttccctggacctcccggaccccccggtgtcccaggcctgcccggcgagccaggccgctttggggtgaacagctccgacgtcccaggacccgccggccttcctggtgtgcctgggcgcgagggtccccccgggtttcctggcctcccgggacccccaggccctccgggaagagaggggcccccaggaaggactgggcagaaaggcagcctgggtgaagcaggcgccccaggacataaggggagcaagggagcccccggtcctgctggtgctcgtggggagagcggcctggcaggagcccccggacctgctggaccaccaggcccccctgggccccctgggcccccaggaccaggactccccgctggatttgatgacatggaaggctccggggggcccttctggtcaacagcccgaagcgctgatgggccacagggacctcccggcctgccgggacttaagggggatcctggcgtgcctgggctgccgggggcgaagggagaagttggagcagatggagtccccgggttccccggcctccctggcagagagggcattgctgggccccaggggccaaagggagacagaggcagccggggagaaaagggagatccagggaaggacggagtcgggcagccgggcctccctggcccccccggacccccgggacctgtggtctacgtgtcggagcaggacggatccgtcctgagcgtgccgggacctgagggccggccgggtttcgcaggctttcccggacctgcaggacccaagggcaacctgggctctaagggcgaacgaggctccccgggacccaagggtgagaagggtgaaccgggcagcatcttcagccccgacggcggtgccctgggccctgcccagaaaggagccaaggtgagggccgggcttccgaggacccccgggtccatacggacggccggggtacaagggagagattggctttcctggacggccgggtcgccccgggatgaacggattgaaaggagagaaaggggagccgggagatgccagccttggatttggcatgaggggaatgcccggccccccaggacctccagggcccccaggccctccagggactcctgtttacgacagcaatgtgtttgctgagtccagccgccccgggcctccaggattgccagggaatcagggccctccaggacccaagggcgccaaaggagaagtgggcccccccggaccaccagggcagtttccgtttgactttcttcagttggaggctgaaatgaagggggagaagggagaccgaggtgatgcaggacagaaaggcgaaaggggggagcccgggggcggcggtttcttcggctccagcctgcccggcccccccggccccccaggccccccaggcccacgtggctaccctgggattccaggtcccaagggagagagcatccggggccagcccggcccacctggacctcagggaccccccggcatcggctacgaggggcgccagggccctcccggccccccaggccccccagggcccccttcatttcctggccctcacaggcagactatcagcgttcccggccctccgggcccccctgggccccctgggccccctggaaccatgggcgcctcctcaggggtgaggctctgggctacacgccaggccatgctgggccaggtgcacgaggttcccgagggctggctcatcttcgtggccgagcaggaggagctctacgtccgcgtgcagaacgggttccggaaggtccagctggaggcccggacaccactcccacgagggacggacaatgaagtggccgccttgcagccccccgtggtgcagctgcacgacagcaacccctacccgcggcgggagcacccccaccccaccgcgcggccctggcgggcagatgacatcctggccagcccccctcgcctgcccgagccccagccctaccccggagccccgcaccacagctcctacgtgcacctgcggccggcgcgacccacaagcccacccgcccacagccaccgcgacttccagccggtgctccacctggttgcgctcaacagccccctgtcaggcggcatgcggggcatccgcggggccgacttccagtgcttccagcaggcgcgggccgtggggctggcgggcaccttccgcgccttcctgtcctcgcgcctgcaggacctgtacagcatcgtgcgccgtgccgaccgcgcagccgtgcccatcgtcaacctcaaggacgagctgctgtttcccagctgggaggctctgttctcaggctctgagggtccgctgaagcccggggcacgcatcttctcctttgacggcaaggacgtcctgaggcaccccacctggccccagaagagcgtgtggcatggctcggaccccaacgggcgcaggctgaccgagagctactgtgagacgtggcggacggaggctccctcggccacgggccaggcctcctcgctgctggggggcaggctcctggggcagagtgccgcgagctgccatcacgcctacatcgtgctctgcattgagaacagcttcatgactgcctccaagtagccaccgcctggatgcggatggccggagaggaccggcggctcggaggaagcccccaccgtgggcagggagcggccggccagcccctggccccaggacctggctgccatactttcctgtatagttcacgtttcatgtaatcctcaagaaataaaaggaagccaaagagtgtatttttttaaaagtttaaaacagaagcctgatgctgacattcacctgccccaactctcccctgacctgtgagcccagctgggtcaggcagggtgcagtatcatgccctgtgcaacctcttggcctgatcagaccacggctcgatttctccaggatttcctgctttgggaagccgtgctcgccccagcaggtgctgacttcatctcccacctagcagcaccgttctgtgcacaaaacccagacctgttagcagacaggccccgtgaggcaatgggagctgaggccacactcagcacaaggccatctgggctcctccagggtgtgtgctcgccctgcggtagatgggagggaggctcaggtccctggggctagggggagccccttctgctcagctctgggccattctccacagcaaccccaggctgaagcaggttcccaagctcagaggcgcactgtgacccccagctccggcctgtcctccaacaccaagcacagcagcctggggctggcctcccaaatgagccatgagatgatacatccaaagcagacagctccaccctggccgagtccaagctgggagattcaagggacccatgagttggggtctggcagcctcccatccagggcccccatctcatgcccctggctgggacgtggctcagccagcacttgtccagctgagcgccaggatggaacacggccacatcaaagaggctgaggctggcacaggacatgcggtagccagcacacagggcagtgagggagggctgtcatctgtgcactgcccatggacaggctggctccagatgcagggcagtcattggctgtctcctaggaaacccatatccttaccctccttgggactgaaggggaaccccggggtgcccacaggccgccctgcgggtgaacaaagcagccacgaggtgcaacaaggtcctctgtcagtcacagccacccctgagatccggcaacatcaacccgagtcattcgttctgtggagggacaagtggactcagggcagcgccaggctgaccacagcacagccaacacgcacctgcctcaggactgcgacgaaaccggtggggctggttctgtaattgtgtgtgatgtgaagccaattcagacaggcaaataaaagtgaccttttacactg

SEQ ID NO: 5925 - DNA, 758 bp, Homo sapiens
ggccgttgaggaggtgcagggagaggagcgggagggctctgggtggctgccaagggggagctctgcgctcagaccctcaactaagaccaggaggtgcctgatgaggccccagcctgcagagccagctcctggtggaagaggaaatgaggcatgctccattcattcggaggtcacgaacgagatcacgccggtgctgtcgtactcctacctggccgtgctggtgcccgtgttcctgctcaccgactacctgcgctacacgccggtgctgctgctgcaggggctcagcttcgtgtcggtgtggctgctgctgctgctgggccactcggtggcgcacatgcagctcatggagctcttctacagcgtcaccatggccgcgcgcatcgcctattcctcctacatcttctctctcgtgcggcccgcgcgctaccagcgtgtggccggctactcgcgcgctgcggtgctgctgggcgtgttcaccagctccgtgctgggccagctgctggtcactgtgggccgagtctccttctccacgctcaactacatctcgctggccttcctcaccttcagcgtggtcctcgccctcttcctgaagcgccccaagcgcagcctcttcttcaaccgcgacgaccgggggcggtgcgaaacctcggcttcggagctggagcgcatgaatcctggcccaggcgggaagctgggacacgccctgcgggtggcctgtggggactcagtgctggcgcggatgctgcgggagctggggg

SEQ ID NO: 5926 - DNA, 4219 bp, Homo sapiens
cactctggctgggagcagaaggcagcctcggtctctgggcggcggcggcggcccactctgccctggccgcgctgtgtggtgaccgcaggccccagacatgagggcggcccgtgctctgctgcccctgctgctgcaggcctgctggacagccgcgcaggatgagccggagaccccgagggccgtggccttccaggactgccccgtggacctgttctttgtgctggacacctctgagagcgtggccctgaggctgaagccctacggggccctcgtggacaaagtcaagtccttcaccaagcgcttcatcgacaacctgagggacaggtactaccgctgtgaccgaaacctggtgtggaacgcaggcgcgctgcactacagtgacgaggtggagatcatccaaggcctcacgcgcatgcctggcggccgcgacgcactcaaaagcagcgtggacgcggtcaagtactttgggaagggcacctacaccgactgcgctatcaagaaggggctggagcagctcctcgtggggggctcccacctgaaggagaataagtacctgattgtggtgaccgacgggcaccccctggagggctacaaggaaccctgtggggggctggaggatgctgtgaacgaggccaagcacctgggcgtcaaagtcttctcggtggccatcacacccgaccacctggagccgcgtctgagcatcatcgccacggaccacacgtaccggcgcaacttcacggcggctgactggggccagagccgcgacgcagaggaggccatcagccagaccatcgacaccatcgtggacatgatcaaaaataacgtggagcaagtgtgctgctccttcgaatgccagcctgcaagaggacctccggggctccggggcgaccccggctttgagggagaacgaggcaagccggggctcccaggagagaagggagaagccggagatcctggaagacccggggacctcggacctgttgggtaccagggaatgaagggagaaaaagggagccgtggggagaagggctccaggggacccaagggctacaagggagagaagggcaagcgtggcatcgacggggtggacggcgtgaagggggagatggggtacccaggcctgccaggctgcaagggctcgcccgggtttgacggcattcaaggaccccctggccccaagggagaccccggtgcctttggactgaaaggagaaaagggcgagcctggagctgacggggaggcggggagaccagggagctcgggaccatctggagacgagggccagccgggagagcctgggccccccggagagaaaggagaggcgggcgacgaggggaacccaggacctgacggtgcccccggggagcggggtggccctggagagagaggaccacgggggaccccaggcacgcggggaccaagaggagaccctggtgaagctggcccgcagggtgatcagggaagagaaggccccgttggtgtccctggagacccgggcgaggctggccctatcggacctaaaggctaccgaggcgatgagggtcccccagggtccgagggtgccagaggagccccaggacctgccggaccccctggagacccggggctgatgggtgaaaggggagaagacggccccgctggaaatggcaccgagggcttccccggcttccccgggtatccgggcaacaggggcgctcccgggataaacggcacgaagggctaccccggcctcaagggggacgagggagaagccggggaccccggagacgataacaacgacattgcaccccgaggagtcaaaggagcaaaggggtaccggggtcccgagggcccccagggacccccaggacaccaaggaccgcctgggccggacgaatgcgagattttggacatcatcatgaaaatgtgctcttgctgtgaatgcaagtgcggccccatcgacctcctgttcgtgctggacagctcagagagcattggcctgcagaacttcgagattgccaaggacttcgtcgtcaaggtcatcgaccggctgagccgggacgagctggtcaagttcgagccagggcagtcgtacgcgggtgtggtgcagtacagccacagccagatgcaggagcacgtgagcctgcgcagccccagcatccggaacgtgcaggagctcaaggaagccatcaagagcctgcagtggatggcgggcggcaccttcacgggggaggccctgcagtacacgcgggaccagctgctgccgcccagcccgaacaaccgcatcgccctggtcatcactgacgggcgctcagacactcagagggacaccacaccgctcaacgtgctctgcagccccggcatccaggtggtctccgtgggcatcaaagacgtgtttgacttcatcccaggctcagaccagctcaatgtcatttcttgccaaggcctggcaccatcccagggccggcccggcctctcgctggtcaaggagaactatgcagagctgctggaggatgccttcctgaagaatgtcaccgcccagatctgcatagacaagaagtgtccagattacacctgccccatcacgttctcctccccggctgacatcaccatcctgctggacggctccgccagcgtgggcagccacaactttgacaccaccaagcgcttcgccaagcgcctggccgagcgcttcctcacagcgggcaggacggaccccgcccacgacgtgcgggtggcggtggtgcagtacagcggcacgggccagcagcgcccagagcgggcgtcgctgcagttcctgcagaactacacggccctggccagtgccgtcgatgccatggactttatcaacgacgccaccgacgtcaacgatgccctgggctatgtgacccgcttctaccgcgaggcctcgtccggcgctgccaagaagaggctgctgctcttctcagatggcaactcgcagggcgccacgcccgctgccatcgagaaggccgtgcaggaagcccagcgggcaggcatcgagatcttcgtggtggtcgtgggccgccaggtgaatgagccccacatccgcgtcctggtcaccggcaagacggccgagtacgacgtggcctacggcgagagccacctgttccgtgtccccagctaccaggccctgctccgcggtgtcttccaccagacagtctccaggaaggtggcgctgggctagcccaccctgcacgccggcaccaaaccctgtcctcccacccctccccactcatcactaaacagagtaaaatgtgatgcgaattttcccgaccaacctgattcgctagattttttttaaggaaaagcttggaaagccaggacacaacgctgctgcctgctttgtgcagggtcctccggggctcagccctgagttggcatcacctgcgcagggccctctggggctcagccctgagctagtgtcacctgcacagggccctctgaggctcagccctgagctggcgtcacctgtgcagggccctctggggctcagccctgagctggcctcacctgggttccccaccccgggctctcctgccctgccctcctgcccgccctccctcctgcctgcgcagctccttccctaggcacctctgtgctgcatcccaccagcctgagcaagacgccctctcggggcctgtgccgcactagcctccctctcctctgtccccatagctggtttttcccaccaatcctcacctaacagttactttacaattaaactcaaagcaagctcttctcctcagcttggggcagccattggcctctgtctcgttttgggaaaccaaggtcaggaggccgttgcagacataaatctcggcgactcggccccgtctcctgagggtcctgctggtgaccggcctggaccttggccctacagccctggaggccgctgctgaccagcactgaccccgacctcagagagtactcgcaggggcgctggctgcactcaagaccctcgagattaacggtgctaaccccgtctgctcctccctcccgcagagactggggcctggactggacatgagagccccttggtgccacagagggctgtgtcttactagaaacaacgcaaacctctccttcctcagaatagtgatgtgttcgacgttttatcaaaggccccctttctatgttcatgttagttttgctccttctgtgtttttttctgaaccatatccatgttgctgacttttccaaataaaggttttcactcctc

SEQ ID NO: 5927 - DNA, 2148 bp, Homo sapiens
tgctgtggaaactcttctggggccccggggggactaccctgcctgccgtgtgcattgcaggagtgtgacgtcatgacctacgtgagggagacctgcgggtgctgcggtgaggcactgcccacggcagggtcggggcccatgcaccgggtggagggcgggagtgcagcagggctgggtcatcgctgggtcctgcatgtgcacgtgaccctagggtctgaggtctccccggtaccccccgatgaccctgccacccccccagactgtgagaagcgctgtggcgccctggacgtggtcttcgtcatcgacagctccgagagcattgggtacaccaacttcacactggagaagaacttcgtcatcaacgtggtcaacaggctgggtgccatcgctaaggaccccaagtccgagacaggtcagcggggcaggggcgggtgcagcattgcggggggccgggcggggcgtgggaggcgatgagatgggagaagtccagacgcgtccctccaacgagggcctctgcatggctggggatgccccagaccccgaggcctctggcaacgacctcacgcgtgcggcttgcagggacgcgtgtgggcgtggtgcagtacagccacgagggcacctttgaggccatccagctggacgacgaacgtatcgactccctgtcgagcttcaaggaggctgtcaagaacctcgagtggattgcgggcggcacctggacaccctcagccctcaagtttgcctacgaccgcctcatcaaggagagccggcgccagaagacacgtgtgtttgcggtggtcatcacggacgggcgccacgaccctcgggacgatgacctcaacttgcgggcgctgtgcgaccgcgacgtcacagtgacggccatcggcatcggggacatgttccacgagaagcacgagagtgaaaacctctactccatcgcctgcgacaagccacagcaggtgcgcaacatgacgctgttctccgacctggtcgctgagaagttcatcgatgacatggaggacgtcctctgcccgggtgagcgtgtgggcgcggggcagtcggccgaggagcagcaggccccagccgctgtctagcgtgagccccagggacacccctcacctgagggatgaatgtgcagcccaggatcttgggctgtgggtgggaaggggtcgggccctctcggggctgcagggcagaggccagctgcaccctgagcctgtctaggcagatcagtgaacggccgctgagggttcgctagggactgaccctggcctggcccggcctctctcctctcttccagaccctcagatcgtgtgcccagaccttccctgccaaacaggtaatgcagggcaccctgagccaccaccccagactagcaaagcagccctggtgtccttcctcctcgagggccgggctgggggaggggccgtgcagggacccggggggcggcggagccactgcggaggctgctccttagggagatggccccaggatggcagcacaggggaggaggggcttggggaaggcaggctcccaggaacgcaggaacagcatcacgaggccatgaggtgggtgctgctagcctggcgctgtgctcggcatgtggccactggtcttgaaggcccaccatgggccttgcagtctccctcagctgccgcccagctcccatgggctggccgtgcatgtgccactcggaggaagccctggattcagtgagtgaaaccatcccggggtggaagcactgacaccccccagcaccagcaggtcttgctccaaccctggcctgcctcggagctgcagctgcggctctcacatctctgggagtgggggagcccatgtcccggatgtggcccacgtgggtgtgaagctggagctgggggtgccgtccaggctctgctggacgtggtgctgcccccatggtgcactgctgcaccgtacctgggcccacaggaggtccccgggggcgttaggagctgagtccccctcagtgagccgtcccctccaggagtgtgagggtagggatgccatggagacagggtgggagggtccgacctggaggaccacagggaggaaacctcagggtctgcggtacgaagtcagcgcttcctcagcacgcgggtcgcggtgtgcgttcgggcgttccatggggag

SEQ ID NO: 5928 - DNA, 2134 bp, Homo sapiens
gcagtgaaaatgttattagttttgagggggtttgggaagcccagcggtacctgaggagtttctggacatttaagccggttcctaggtgtggccttaacagggaggctgcccttcctttcactgaatgagctgcgtcactcataagctcactgagggaaccccatctgccagctcgtgcgtgctcagacggcgtccatgtctcaagcgttctgtgaaggctgcggtgcagcgtgaggtcaccctgctgtgttcagagctttgctcactgcctgcggggctggaccgttgcacctccagggcccccagaaaccgagtttcgggtcagggtcctctgtgtgcattcctgggggtccatgtaccagctgtgacgacgtccaggggttgggctgagaagcagacacccttggggaaactggctctgtccctcccctcccccatcccaggagctgaggtcttggtgaggccacagggccaggtccacgcaaggactgtccgtgtcctgtcctgtggtctctggccccacgtgacacccacacgtgtggtaggcagcctggcctgggttgtggctatggccaggcccccaagctgtccccgatgcccagggctggtgaccacccaggcaggtgggggccccacttggtaacagagtcatagggcagaacccacctgggctgccacagaaggtctggctgcccctgtgcccactgctccccaccatggccaatcagaagagtcaggggctcctggtctttccgggagggacgtggcccagccagctctaggtgttctgagcagctctgggacccagcgattgaggggtcaggctgggggtgtcagagccagggtcctccttaagtacctcccacactacacagacagtggcccttttgtgggcagcaaattcttgagccatgaaaggatgctttgggccccttccctcccaggagggcagcctgtgcagggatggtgctcagcaggtggacagggcctggggcctgtgtcagggtctcaggcctgggagcaccagcagaggagatggcggctcccagcagtgccgcctgaaagtgtcttgggctaaggacccacacccagggctgccctgcagaaacgcccccgcagagcccagtggtctgtgaggttgcaggcagggtgcgaatggaagggcacaggtgcggggctggcacctgcccggtcctgcccacctcccctccgcccagcccgcacctgcgtctccccacagagctgtccgtggcacagtgcacgcagcggcccgtggacatcgtcttcctgctggacggctccgagcggctgggtgagcagaacttccacaaggcccggcgcttcgtggagcaggtggcgcggcggctgacgctggcccggagggacgacgaccctctcaacgcacgcgtggcgctgctgcagtttggtggccccggcgagcagcaggtggccttcccgctgagccacaacctcacggccatccacgaggcgctggagaccacacaatacctgaactccttctcgcacgtgggcgcaggcgtggtgcacgccatcaatgccatcgtgcgcagcccgcgtggcggggcccggaggcacgcagagctgtccttcgtgttcctcacggacggcgtcacgggcaacgacagtctgcacgagtcggcgcactccatgcgcaagcagaacgtggtacccaccgtgctggccttgggcagcgacgtggacatggacgtgctcaccacgctcagcctgggtgaccgcgccgccgtgttccacgagaaggactatgacagcctggcgcaacccggcttcttcgaccgcttcatccgctggatctgctagcgccgccgcccgggccccgcagtcgagggtcgtgagcccaccccgtccatggtgctaagcgggcccgggtcccacacggccagcaccgctgctcactcggacgacgccctgggcctgcacctctccagctcctcccacggggtccccgtagccccggcccccgcccagccccaggtctccccaggccctccgcaggctgcccggcctccctccccctgcagccatcccaaggctcctgacctacctggcccctgagctctggagcaagccctgacccaataaaggctttgaaccc

SEQ ID NO: 5929 - DNA, 403 bp, Homo sapiens
cacgaggcgctggagaccacacaatacctgaactccttctcgcacgtgggcgcaggcgtggtgcacgccatcaatgccatcgtgcgcagcccgcgtggcggggcccggaggcacgcagagctgtccttcgtgttcctcacggacggcgtcacgggcaacgacagtctgcacgagtcggcgcactccatgcgcaagcagaacgtggtacccaccgtgctggccttgggcagcgacgtggacatggacgtgctcaccacgctcagcctgggtgaccgcgccgccgtgttccacgagaaggactatgacagcctggcctccctccccctgcagccatcccaaggctcctgacctacctggcccctgagctctggagcaagccctgacccaataaaggctttgaacc

SEQ ID NO: 5930 - DNA, 404 bp, Homo sapiens
ccggaggcacgcagagctgtccttcgtgttcctcacggacggcgtcacgggcaacgacagtctgcacgagtcggcgcactccatgcgcaagcagaacgtggtacccaccgtgctggccttgggcagcgacgtggacatggacgtgcccaccccgtccatggtgctaagcgggcccgggtcccacacggccagcaccgctgctcactcggacgacgccctgggcctgcacctctccagctcctcccacggggtccccgtagccccggcccccgcccagccccaggtctccccaggccctccgcaggctgcccggcctccctccccctgcagccatcccaaggctcctgacctacctggcccctgagctctggagcaagccctgacccaataaaggctttgaaccc

SEQ ID NO: 5931 - DNA, 3206 bp, Homo sapiens
cccttgcctactgctcatgggtgtggagactgatattctggaagactgataggcagatttactattaacaaacacatagtctgtggcccagcaaagccaccccaatccctgcacaagggtaaaaggccagcattagagcactgcagcagcaatgacggagggcacgtgtctgcggcgccgagggggcccctacaagaccgagcccgccaccgacctcggccgctggcgactcaactgcgagaggggccggcagacgtggacctacctgcaggacgagcgcgccggccgcgagcagaccggcctggaagcctacgccctggggctggacaccaagaattactttaaggacttgcccaaagcccacaccgcctttgagggggctctgaacgggatgacattttacgtggggctgcaggctgaggatgggcactggacgggtgattatggtggcccacttttcctcctgccaggcctcctgatcacttgccacgtggcacgcatccctctgccagccggatacagagaagagattgtgcggtacctgcggtcagtgcagctccctgacggtggctggggcctgcacattgaggataagtccaccgtgtttgggactgcgctcaactatgtgtctctcagaattctgggtgttgggcctgacgatcctgacctggtacgagcccggaacattcttcacaagaaaggtggtgctgtggccatcccctcctgggggaagttctggctggctgtcctgaatgtttacagctgggaaggcctcaataccctgttcccagagatgtggctgtttcctgactgggcaccggcacacccctccacactctggtgccactgccggcaggtgtacctgcccatgagctactgctacgccgttcggctgagtgccgcggaagacccgctggtccagagcctccgccaggagctctatgtggaggacttcgccagcattgactggctggcgcagaggaacaacgtggcccccgacgagctgtacacgccccacagctggctgctccgcgtggtatatgcgctcctcaacctgtatgagcaccaccacagtgcccacctgcggcagcgggccgtgcagaagctgtatgaacacattgtggccgacgaccgattcaccaagagcatcagcatcggcccgatctcgaaaaccatcaacatgcttgtgcgctggtatgtggacgggcccgcctccactgccttccaggagcatgtctccagaatcccggactatctctggatgggccttgacggcatgaaaatgcagggcaccaacggctcacagatctgggacaccgcattcgccatccaggctctgcttgaggcgggcgggcaccacaggcccgagttttcgtcctgcctgcagaaggctcatgagttcctgaggctctcacaggtcccagataaccctcccgactaccagaagtactaccgccagatgcgcaagggtggcttctccttcagtacgctggactgcggctggatcgtttctgactgcacggctgaggccttgaaggctgtgctgctcctgcaggagaagtgtccccatgtcaccgagcacatccccagagaacggctctgcgatgctgtggctgtgctgctgaacatgagaaatccagatggagggttcgccacctatgagaccaagcgtggggggcacttgctggagctgctgaacccctcggaggtcttcggggacatcatgattgactacacctatgtggagtgcacctcagccgtgatgcaggcgcttaagtatttccacaagcgtttcccggagcacagggcagcggagatccgggagaccctcacgcagggcttagagttctgtcggcggcagcagagggccgatggctcctgggaaggctcctggggagtttgcttcacctacggcacctggtttggcctggaggccttcgcctgtatggggcagacctaccgagatgggactgcctgtgcagaggtctcccgggcctgtgacttcctgctgtcccggcagatggcagacggaggctggggggaggactttgagtcctgcgaggagcggcgttatttgcagagtgcccagtcccagatccataacacatgctgggccatgatggggctgatggccgttcggcatcctgacatcgaggcccaggagagaggagtccggtgtctacttgagaaacagctccccaatggcgactggccgcaggaaaacattgctggggtcttcaacaagtcctgtgccatctcctacacgagctacaggaacatcttccccatctgggccctcggccgcttctcccagctgtaccctgagagagcccttgctggccacccctgagaacatgcctacctgctgggtgccgtctgtgcgttccagtgaggccaaggggtcctggccgggttggggagccctcccataaccctgtcttgggctccaacccctcaacctctatctcatagatgtgaatctgggggccaggctggaggcagggatggggacagggtgggtggcttagactcttgatttttactgtaggttcatttctgaaagtagcttgtcgggcttgggtgaggaagggggcacaggagccgtgacccctgaggaggcacagcgccttctgccacctctgggcacggcctcaaggtagtgaggctaggaggttttttctgaccaatagctgagttcttgggagaggagcagctgtgcctgtgtgattccttagtgtcgagtgggctctgggctggggtcggccctgggcaggcttctcctgcaccttttgtctgctgggctgagggacacgagggcaaccctgtgacaatggcaggtagtgtgcatccgtgaatagcccagtgcgggggttgctcatggagcatcctgaggccgtgcagcagggagccccatgcccctgggtcgtgagcttgcctgcgtatggggtggtgtcatggagcctcatgcccctgggtcgtgagctcgcctgagtatggggtggtgtcatggagccgcatacccctgggttgtgagctcgcctgcatatgcagggtctgtcatggaacatcccaagtctgtgcagcagggagccccatgcccctgggacatgaacccacctgcgtggaatgctgtttgtgaggtgtctacagggtttatagtagtcttgtggacacagaaatgcacaggggacacttacggacacaga

SEQ ID NO: 5932 - protein, 732 aa, Homo sapiens
MTEGTCLRRRGGPYKTEPATDLGRWRLNCERGRQTWTYLQDERAGREQTGLEAYALGLDTKNYFKDLPKAHTAFEGALNGMTFYVGLQAEDGHWTGDYGGPLFLLPGLLITCHVARIPLPAGYREEIVRYLRSVQLPDGGWGLHIEDKSTVFGTALNYVSLRILGVGPDDPDLVRARNILHKKGGAVAIPSWGKFWLAVLNVYSWEGLNTLFPEMWLFPDWAPAHPSTLWCHCRQVYLPMSYCYAVRLSAAEDPLVQSLRQELYVEDFASIDWLAQRNNVAPDELYTPHSWLLRVVYALLNLYEHHHSAHLRQRAVQKLYEHIVADDRFTKSISIGPISKTINMLVRWYVDGPASTAFQEHVSRIPDYLWMGLDGMKMQGTNGSQIWDTAFAIQALLEAGGHHRPEFSSCLQKAHEFLRLSQVPDNPPDYQKYYRQMRKGGFSFSTLDCGWIVSDCTAEALKAVLLLQEKCPHVTEHIPRERLCDAVAVLLNMRNPDGGFATYETKRGGHLLELLNPSEVFGDIMIDYTYVECTSAVMQALKYFHKRFPEHRAAEIRETLTQGLEFCRRQQRADGSWEGSWGVCFTYGTWFGLEAFACMGQTYRDGTACAEVSRACDFLLSRQMADGGWGEDFESCEERRYLQSAQSQIHNTCWAMMGLMAVRHPDIEAQERGVRCLLEKQLPNGDWPQENIAGVFNKSCAISYTSYRNIFPIWALGRFSQLYPERALAGHP

SEQ ID NO: 5933 - DNA, 6114 bp, Homo sapiens
gtaatacttaattaccttctaataattggagcagaagatgaacccaactaatcctttcagtgggcagcagcctagtgctttttcggcgtcttctagtaatgtaggaacacttccatctaagccgccatttcgatttggtcaaccttctctttttggacaaaacagtaccttatctgggaagagctcgggattttcacaggtatccagctttccagcgtcttctggagtaagtcattcctcttcagtgcaaacattagggttcacccaaacctcaagtgttggacccttttctggacttgagcacacttccacctttgtggctacctctgggccttcaagttcatctgtgctgggaaacacaggatttagttttaaatcacccaccagtgttggggctttcccaagcacttctgcttttggacaagaagctggagaaatagtgaactctggttttgggaaaacagaattcagctttaaacctctggaaaatgcagtgttcaaaccaatactgggggctgaatctgagccagagaaaacccagagccaaattgcttctgggttttttacattttcccacccaattagtagtgcacctggaggcctggcccctttctcttttcctcaagtaacaagtagttcagctaccacttcaaattttaccttttcaaaacctgttagtagtaataattcattatctgcctttacccctgctttgtcaaaccaaaatgtagaggaagagaagagaggacctaagtcaatatttggaagttctaataatagcttcagtagcttccctgtatcatctgcggttttgggcgaacctttccaggctagcaaagcaggtgtcaggcaggggtgtgaagaagctgtttcccaggtggaaccacttcccagcctaatgaaaggactgaaaaggaaggaggaccaggatcgctccccaaggagacatggccacgagccagcagaagattcggatcctctgtcccggggcgatcatcctccagacaaacgacctgtccgcctgaatcgaccccggggaggtactttatttggtcggacgatacaggatgttttcaaaagcaataaggaagtaggtcgtctgggcaacaaggaggccaaaaaggaaactggctttgttgagtctgcagaaagtgaccacatggctatcccaggagggaatcagtctgtcctggcaccttcccggattccaggtgtgaataaagaggaagaaactgaaagtagagagaagaaagaagattctctaagaggaactccggcgcgtcagagtaacagaagcgagagcacagacagtcttgggggcttgtctccctctgaagtcacagccatccagtgcaagaacatccctgactacctcaacgacaggaccattctggagaaccattttggcaaaattgctaaagtgcagcgcatctttaccaggcgcagcaaaaagcttgcagtggtacatttctttgatcatgcatctgcagccctggctagaaagaaggggaaaagtttgcataaagacatggctatcttttggcacaggaagaaaataagccccaataagaaacccttttccctgaaggagaagaaaccaggtgacggtgaagtcagcccgagcacagaggatgcaccctttcagcactctcctcttggcaaggccgcagggaggactggtgctagcagcctcctgaataaaagctctccagtgaagaagccaagtcttctaaaggcccaccaattcgagggagactcttttgactcagcctccgagggctccgagggcctcgggccatgtgtgctctccctcagtaccctgataggcactgtggctgagacatccaaggagaagtaccgcctgcttgaccagagagacaggatcatgcggcaagctcgggtgaagagaaccgatctggacaaagcgaggacttttgttggcacctgcctggatatgtgtcctgagaaggagaggtacatgcgggagacccgtagccagctgagcgtgttcgaagtggtcccagggactgaccaggtggaccacgcagcagctgtgaaagagtacagtcggtcctcggcggatcaggaggagcccctgccccacgagctgcggcccttgccagtgctcagcaggaccatggactacctggtgacccagatcatggaccagaaggagggcagcctgcgggattggtatgacttcgtgtggaaccgcacgcgtggcatacggaaggatatcacgcagcagcacctctgtgaccccctgacggtgtccctgattgagaagtgcacccggtttcacatccactgtgcccacttcatgtgtgaggagcccatgtcctcctttgatgccaagatcaataatgagaacatgaccaagtgcctgcagagcctgaaggagatgtaccaggacctgagaaacaagggtgtcttctgtgccagcgaagcggagttccagggctacaatgttctgctcagtctcaacaagggagacatcctaagagaagtacaacagttccatcctgctgttagaaactcatctgaggtgaaatttgctgttcaggcttttgctgcattgaacagtaataattttgtgagatttttcaaactggtccagtcagcttcttacctgaacgcttgtcttttacactgttacttcagtcagatccgcaaggatgctctccgggcgctcaactttgcgtacacggtgagcacacagcgatctaccatctttcccctggatggtgtggtgcgcatgctgctgttcagagactgtgaagaggccaccgacttcctcacctgccacggcctcaccgtttccgacggctgtgtggagctgaaccggtctgcattcctggaaccagagggattatccaagaccaggaagtcggtgtttattactaggaagctgacggtgtcagtcggggaaattgtgaacggagggccattgccccccgtccctcgtcacacccctgtgtgcagcttcaactcccagaacaagtacatcggggagagcctggccgcggagctgcccgtcagcacccagagacccggctccgacacagtgggcggagggagaggagaggagtgtggtgtagagccggatgcacccctgtccagtctcccacagtctctaccagcccctgcgccctcaccagtgcctctgcctcctgtcctggcactgaccccgtctgtggcgcccagcctcttccagctgtctgtgcagcctgaaccaccgcctccagagcccgtgcccatgtactctgacgaggacctggcgcaggtggtggacgagctcatccaggaggccctgcagagggactgtgaggaagttggctctgcgggtgctgcctacgcagctgccgccctgggtgtttctaatgctgctatggaggatttgttaacagctgcaaccacgggcattttgaggcacattgcagctgaagaagtgtctaaggaaagagagcgaagggagcaggagaggcagcgggctgaagaggaaaggttgaaacaagagagagagctggtgttaagtgagctgagccagggcctggccgtggagctgatggaacgcgtgatgatggagtttgtgagggaaacctgctcccaggagttgaagaatgcagtagagacagaccagagggtccgtgtggcccgttgctgtgaggatgtctgtgcccacttagtggacttgtttctcgtggaggaaatcttccagactgcaaaggagaccctccaggagcttcagtgcttctgcaagtatctacagcggtggagggaagctgtcacagcccgcaagaaactgaggcgccaaatgcgggctttccctgctgcgccctgctgcgtggacgtgagcgaccggctgagggcgctggcgcccagcgcagagtgccccattgctgaagagaacctggccaggggcctcctggacctgggccatgcagggagattgggcatctcttgcaccaggttaaggcggctcagaaacaagacagctcaccagatgaaggttcagcacttctaccagcagctgctgagtgatgtggcatgggcgtctctggacctgccatccctcgtggctgagcacctccctgggaggcaggagcatgtgttttggaagctggtgctggtgttgccggatgtagaggagcagtccccagagagttgtggcagaattctagcaaattggttaaaagtcaagttcatgggagatgaaggctcagtggatgacacatccagcgatgctggtgggattcagacgctttcgcttttcaactcacttagcagcaaaggggatcagatgatttctgttaacgtgtgtataaaggtggcccatggcgccctcagtgatggtgccattgatgctgtggagacacagaaggacctcctgggagccagtgggctcatgctgctgcttccccccaaaatgaagagtgaggacatggcagaggaggacgtgtactggctgtcggccttgctgcagctcaagcagctcctgcaggctaagcccttccagcctgcgcttcctctggtggttcttgtgcctagcccaggaggggacgccgttgagaaggaagtagaagatggtctgatgctacaggacttggtttcagctaagctgatttcagattacactgttaccgagatccctgataccattaatgatctacaaggttcaactaaggttttgcaagcagtgcagtggctggtttcccactgcccccattcccttgacctctgctgccagactctcattcagtacgtcgaagacgggattggccatgagtttagtggccgctttttccatgacagaagagagaggcgtctgggcggtcttgcttctcaggagcctggcgccatcattgagctgtttaacagtgtgctgcagttcctggcttctgtggtgtcctctgaacagctgtgtgacctgtcctggcctgtcactgagtttgctgaggcagggggcagccggctgcttcctcacctgcactggaatgccccagagcacctggcctggctgaagcaggctgtgctcgggttccagcttccgcagatggaccttccacccctgggggccccctggctccccgtgtgctccatggttgtccagtacgcctcccagatccccagctcacgccagacacagcctgtcctccagtcccaggtggagaacctgctccacagaacctactgtaggtggaagagcaagagtccctccccagtccatggggcaggcccctcggtcatggagatcccatgggatgatcttatcgccttgtgtatcaaccacaagctgagagactggacgcccccccggcttcctgttacatcagaggcgctgagtgaagatggtcagatatgtgtgtatttttttaaaaacgatttgaaaaaatatgatgttcctttgtcgtgggaacaagccaggttgcagacgcagaaggagctacagctgagagagggacgtttggcaataaagccttttcatccttctgcaaacaattttcccataccattgcttcacatgcaccgtaactggaagaggagcacagagtgtgctcaagaggggaggattcccagcacagaggatctgatgcgaggagcttctgctgaggagctcttggcgcagtgtttgtcgagcagtctgctgctggagaaagaagagaacaagaggtttgaagatcagcttcagcaatggttgtctgaagactcaggagcatttacggatttaacttcccttcccctctatcttcctcagactctagtgtctctttctcacactattgaacctgtgatgaaaacatctgtaactactagcccacagagtgacatgatgagggagcaactgcagctgtcagaggcgacaggaacgtgtctaggcgaacgactaaagcacctggaaaggctgatccggagttcaagggaagaggaagttgcctctgagctccatctctctgcgctgctagacatggtggacatttgagcagcctgacctgtggggagggggtctctcccgaagagtttctgtttttactcaaaataatgttattctcagatgcttgatgcactgttggaaatgtgattaatttaatcatgcagataaaccatttaaatgtc

SEQ ID NO: 5934 - protein, 1980 aa, Homo sapiens
MNPTNPFSGQQPSAFSASSSNVGTLPSKPPFRFGQPSLFGQNSTLSGKSSGFSQVSSFPASSGVSHSSSVQTLGFTQTSSVGPFSGLEHTSTFVATSGPSSSSVLGNTGFSFKSPTSVGAFPSTSAFGQEAGEIVNSGFGKTEFSFKPLENAVFKPILGAESEPEKTQSQIASGFFTFSHPISSAPGGLAPFSFPQVTSSSATTSNFTFSKPVSSNNSLSAFTPALSNQNVEEEKRGPKSIFGSSNNSFSSFPVSSAVLGEPFQASKAGVRQGCEEAVSQVEPLPSLMKGLKRKEDQDRSPRRHGHEPAEDSDPLSRGDHPPDKRPVRLNRPRGGTLFGRTIQDVFKSNKEVGRLGNKEAKKETGFVESAESDHMAIPGGNQSVLAPSRIPGVNKEEETESREKKEDSLRGTPARQSNRSESTDSLGGLSPSEVTAIQCKNIPDYLNDRTILENHFGKIAKVQRIFTRRSKKLAVVHFFDHASAALARKKGKSLHKDMAIFWHRKKISPNKKPFSLKEKKPGDGEVSPSTEDAPFQHSPLGKAAGRTGASSLLNKSSPVKKPSLLKAHQFEGDSFDSASEGSEGLGPCVLSLSTLIGTVAETSKEKYRLLDQRDRIMRQARVKRTDLDKARTFVGTCLDMCPEKERYMRETRSQLSVFEVVPGTDQVDHAAAVKEYSRSSADQEEPLPHELRPLPVLSRTMDYLVTQIMDQKEGSLRDWYDFVWNRTRGIRKDITQQHLCDPLTVSLIEKCTRFHIHCAHFMCEEPMSSFDAKINNENMTKCLQSLKEMYQDLRNKGVFCASEAEFQGYNVLLSLNKGDILREVQQFHPAVRNSSEVKFAVQAFAALNSNNFVRFFKLVQSASYLNACLLHCYFSQIRKDALRALNFAYTVSTQRSTIFPLDGVVRMLLFRDCEEATDFLTCHGLTVSDGCVELNRSAFLEPEGLSKTRKSVFITRKLTVSVGEIVNGGPLPPVPRHTPVCSFNSQNKYIGESLAAELPVSTQRPGSDTVGGGRGEECGVEPDAPLSSLPQSLPAPAPSPVPLPPVLALTPSVAPSLFQLSVQPEPPPPEPVPMYSDEDLAQVVDELIQEALQRDCEEVGSAGAAYAAAALGVSNAAMEDLLTAATTGILRHIAAEEVSKERERREQERQRAEEERLKQERELVLSELSQGLAVELMERVMMEFVRETCSQELKNAVETDQRVRVARCCEDVCAHLVDLFLVEEIFQTAKETLQELQCFCKYLQRWREAVTARKKLRRQMRAFPAAPCCVDVSDRLRALAPSAECPIAEENLARGLLDLGHAGRLGISCTRLRRLRNKTAHQMKVQHFYQQLLSDVAWASLDLPSLVAEHLPGRQEHVFWKLVLVLPDVEEQSPESCGRILANWLKVKFMGDEGSVDDTSSDAGGIQTLSLFNSLSSKGDQMISVNVCIKVAHGALSDGAIDAVETQKDLLGASGLMLLLPPKMKSEDMAEEDVYWLSALLQLKQLLQAKPFQPALPLVVLVPSPGGDAVEKEVEDGLMLQDLVSAKLISDYTVTEIPDTINDLQGSTKVLQAVQWLVSHCPHSLDLCCQTLIQYVEDGIGHEFSGRFFHDRRERRLGGLASQEPGAIIELFNSVLQFLASVVSSEQLCDLSWPVTEFAEAGGSRLLPHLHWNAPEHLAWLKQAVLGFQLPQMDLPPLGAPWLPVCSMVVQYASQIPSSRQTQPVLQSQVENLLHRTYCRWKSKSPSPVHGAGPSVMEIPWDDLIALCINHKLRDWTPPRLPVTSEALSEDGQICVYFFKNDLKKYDVPLSWEQARLQTQKELQLREGRLAIKPFHPSANNFPIPLLHMHRNWKRSTECAQEGRIPSTEDLMRGASAEELLAQCLSSSLLLEKEENKRFEDQLQQWLSEDSGAFTDLTSLPLYLPQTLVSLSHTIEPVMKTSVTTSPQSDMMREQLQLSEATGTCLGERLKHLERLIRSSREEEVASELHLSALLDMVDI

SEQ ID NO: 5935 - DNA, 1095 bp, Homo sapiens
tgccgcccaggacccgcagcagagacgacgcctgcagcaaggagaccaggaaggggtgagacaaggaagaggatgtctgagctggagaaggccatggtggccctcatcgacgttttccaccaatattctggaagggagggagacaagcacaagctgaagaaatccgaactcaaggagctcatcaacaatgagctttcccatttcttagaggaaatcaaagagcaggaggttgtggacaaagtcatggaaacactggacaatgatggagacggcgaatgtgacttccaggaattcatggcctttgttgccatggttactactgcctgccacgagttctttgaacatgagtgagattagaaagcagccaaacctttcctgtaacagagacggtcatgcaagaaagcagacagcaagggcttgcagcctagtaggagctgagctttccagccgtgttgtagctaattaggaagcttgatttgctttgtgattgaaaaattgaaaacctctttccaaaggctgttttaacggcctgcatcattctttctgctatattaggcctgtgtgtaagctgactggccccagggactcttgttaacagtaacttaggagtcaggtctcagtgataaagcgtgcaccgtgcagcccgccatggccgtgtagaccctaacccggagggaaccctgactacagaaattaccccggggcacccttaaaacttccactacctttaaaaaacaaagccttatccagcattatttgaaaacactgctgttctttaaatgcgttcctcatccatgcagataacagctggttggccggtgtggccctgcaagggcgtggtggcttcggcctgcttcccgggatgcgcctgatcaccaggtgaacgctcagcgctggcagcgtcctggaaaaagcaactccatcagaactcgcaatccgagccagctctgggggctccagcgtggcctccgtgacccatgcgattcaagtcgcggctgcaggatccttgcctccaacgtgcctccagcacatgcggcttccgagggcactaccgggggctctgagccaccgcgagggcctgcgttcaataaaaag

SEQ ID NO: 5936 - protein, 92 aa, Homo sapiens
MSELEKAMVALIDVFHQYSGREGDKHKLKKSELKELINNELSHFLEEIKEQEVVDKVMETLDNDGDGECDFQEFMAFVAMVTTACHEFFEHE

SEQ ID NO: 5937 - DNA, 1795 bp, Homo sapiens
cggcgacggccggatggctgcgtggggctgtgtggctgcgctcggcgcggcgcgtgggctttgctggcgggcggcgcgcgcggctgcggggctccagggccgccccgcccgcaggtgctatgctgtgggccccgctcagagcccacccacctttgggttcctgttggacatcgatggagtgcttgtgcggggccacagagtgatccctgctgctctgaaagccttccgaaggctggtgaactcccaggggcagctgcgggtgcccgtggtttttgttacaaatgctgggaacatcttacaacacagcaaagcccaggagctgtcagccctgctggggtgcgaggtggatgcagaccaagttatcctctctcacagccccatgaagctcttctccgagtaccatgagaagcggatgctggtgtctggacaggggcccgtgatggaaaatgcccagggactgggcttccgaaatgtcgtcaccgtggatgagctgcggatggcctttcctctgcttgacatggtggacctggagcggcggctaaagaccacgcccctcccgaggaatgacttcccccgcattgaaggggtgctcctcctaggggagccggtccgctgggagaccagcctgcagctgatcatggatgtcctcctcagcaatgggagccctggggctggcctggcaacacccccctacccccacctccccgtcctagccagcaacatggatctcctgtggatggctgaagccaagatgcccaggtttggacatggcacctttctgctgtgcctggaaaccatttaccagaaagtgacgggcaaggagctgagatacgagggcctgatgggcaaacccagcatcctcacttaccagtatgccgaggacctgatcaggcgacaggcggagaggcggggctgggccgcccccatccggaagctctatgctgtgggtgataaccctatgtctgacgtatacggcgccaacctgttccaccagtacctgcagaaggcaacgcatgatggggcgccagaactaggggccgggggcacacggcagcaacagccctcagcaagccagagctgcatctccatcctggtgtgtacaggcgtctacaatcccaggaacccacagtccacggagcctgtccttggaggaggggagcctccattccacgggcaccgagacttatgcttcagtccagggctcatggaggcctcccacgtggtgaatgacgtgaatgaggctgtgcagctggtcttccgcaaggagggctgggctttggagtgagggcagtgcggtggaggtgagggggtgagcctggacctgtgggcgagtcccattggctgggctctggcctgatcactgggctcaggtcagggcttggttcccttgccacccttcttgctgccccatgagtgtggcattactggtcacttggaagaagacagtgactctttttccctgctgggtagcattttgtatggaacggttggaattttctgggcccagttcccacgtgcctttcgtggcagtctaacctcaggccattctcttcccctgtgtgcctcagtgtccttctcatttcagtagggacttctgaaatgggggaggcagtgtggaatactgtggatgtctgtgcagagcctttgccggcactgaaggcatgcagcctgtcggcagagtgtcttaacaccagatgctactttttactgtattgtagtttattgcccggagatgtggggctttttttttaaataaaataatcataataaatgttcatgatgctgactcttgtga

SEQ ID NO: 5938 - protein, 423 aa, Homo sapiens
MAAWGCVAALGAARGLCWRAARAAAGLQGRPARRCYAVGPAQSPPTFGFLLDIDGVLVRGHRVIPAALKAFRRLVNSQGQLRVPVVFVTNAGNILQHSKAQELSALLGCEVDADQVILSHSPMKLFSEYHEKRMLVSGQGPVMENAQGLGFRNVVTVDELRMAFPLLDMVDLERRLKTTPLPRNDFPRIEGVLLLGEPVRWETSLQLIMDVLLSNGSPGAGLATPPYPHLPVLASNMDLLWMAEAKMPRFGHGTFLLCLETIYQKVTGKELRYEGLMGKPSILTYQYAEDLIRRQAERRGWAAPIRKLYAVGDNPMSDVYGANLFHQYLQKATHDGAPELGAGGTRQQQPSASQSCISILVCTGVYNPRNPQSTEPVLGGGEPPFHGHRDLCFSPGLMEASHVVNDVNEAVQLVFRKEGWALE

SEQ ID NO: 5939 - DNA, 1815 bp, Homo sapiens
gtgcacgtgcgcacggcgacggccggatggctgcgtggggctgtgtggctgcgctcggcgcggcgcgtgggctttgctggcgggcggcgcgcgcggctgcggggctccagggccgccccgcccgcaggtgctatgctgtgggccccgctcagagcccacccacctttgggttcctgttggacatcaatggagtgcttgtgcggggccacagagtgatccctgctgctctgaaagccttccgaaggctggtgaactcccaggggcagctgcgggtgcccgtggtttttgttacaaatgctgggaacatcttacaacacagcaaagcccaggagctgtcagccctgctggggtgcgaggtggatgcagaccaagttatcctctctcacagccccatgaagctcttctccgagtaccatgagaagcggatgctggtgtctggacaggggcccgtgatggaaaatgcccagggactgggcttccgaaatgtcgtcaccgtggatgagctgcggatggcctttcctctgcttgacatggtggacctggagcggcggctaaagaccacgcccctcccgaggaatgacttcccccgcattgaaggggtgctcctcctaggggagccggtccgctgggagaccagcctgcagctgatcatggatgtcctcctcagcaatgggagccctggggctggcctggcaacacccccctacccccacctccccgtcctagccagcaacatggatctcctgtggatggctgaagccaagatgcccaggtttggacatggcacctttctgctgtgcctggaaaccatttaccagaaagtgacgggcaaggagctgagatacgagggcctgatgggcaaacccagcatcctcacttaccagtatgccgaggacctgatcaggcgacaggcggagaggcggggctgggccgcccccatccggaagctctatgctgtgggtgataaccctatgtctgacgtatacggcgccaacctgttccaccagtacctgcagaaggcaacgcatgatggggcgccagaactaggggccgggggcacacggcagcaacagccctcagcaagccagagctgcatctccatcctggtgtgtacaggcgtctacaatcccaggaacccacagtccacggagcctgtccttggaggaggggagcctccattccacgggcaccgagacttatgcttcagtccagggctcatggaggcctcccacgtggtgaatgacgtgaatgaggctgtgcagctggtcttccgcaaggagggctgggctttggagtgagggcagtgcggtggaggtgagggggtgagcctggacctgtgggcgagtcccattggctgggctctggcctgatcactgggctcaggtcagggcttggttcccttgccacccttcttgctgccccatgagtgtggcattactggtcacttggaagaagacagtgactctttttccctgctgggtagcattttgtatggaacggttggaattttctgggcccagttcccacgtgcctttcgtggcagtctaacctcaggccattctcttcccctgtgtgcctcagtgtccttctcatttcagtagggacttctgaaatgggggaggcagtgtggaatactgtggatgtctgtgcagagcctttgccggcactgaaggcatgcagcctgtcggcagagtgtcttaacaccagatgctactttttactgtattgtagtttattgcccggagatgtggggctttttttttaaataaaataatcataataaatgttcatgatgctgaaaaaaaaaaaaaaaaa

SEQ ID NO: 5940 - protein, 393 aa, Homo sapiens
MYAWFFLPSFSQSPPTFGFLLDIDGVLVRGHRVIPAALKAFRRLVNSQGQLRVPVVFVTNAGNILQHSKAQELSALLGCEVDADQVILSHSPMKLFSEYHEKRMLVSGQGPVMENAQGLGFRNVVTVDELRMAFPLLDMVDLERRLKTTPLPRNDFPRIEGVLLLGEPVRWETSLQLIMDVLLSNGSPGAGLATPPYPHLPVLASNMDLLWMAEAKMPRFGHGTFLLCLETIYQKVTGKELRYEGLMGKPSILTYQYAEDLIRRQAERRGWAAPIRKLYAVGDNPMSDVYGANLFHQYLQKATHDGAPELGAGGTRQQQPSASQSCISILVCTGVYNPRNPQSTEPVLGGGEPPFHGHRDLCFSPGLMEASHVVNDVNEAVQLVFRKEGWALE

SEQ ID NO: 5941 - DNA, 1330 bp, Homo sapiens
aggaaccggaacccgcggttataaagtaaaggaacccgagatctgcgcaggggttccctttgccgatttctctcacctcacctttcaaacctaaactcgagcctactgttcaccggcctagcattgctctcgccatggctctcagcgatgctgacgtgcaaaagcagataaagcatatgatggctttcattgaacaagaagccaatgagaaagcagaagaaatagatgcaaaggcagaagaagagttcaacatagagaaaggtcggcttgtgcaaacccaaagactaaagattatggaatattatgagaagaaagagaaacagattgagcagcagaagaaaattcagatgtccaatttgatgaatcaagcgagactcaaagtcctcagagcaagagatgaccttatcacagacctactaaatgaagcaaaacagagactcagcaaggtggtaaaagatacaaccaggtaccaagtgctgctggatggactggttctccagggtttgtaccagttgctggagccccgaatgattgttcgttgcaggaaacaagatttccctctggtaaaggctgcagtgcagaaggcaattcctatgtacaaaattgccaccaaaaacgatgttgatgtccaaattgaccaggagtcctacctgcctgaagacatagctggtggagttgagatctataatggagatcgtaaaataaaggtttccaacaccctggaaagccggctggatctcatagcccagcagatgatgccagaagtccggggagccttgtttggtgcaaatgccaacaggaagtttttggactaagccttcaggaggtggagctcgtcgtcagctctcctgctgtgatgtggaagcttctgatatttgaagaaacacgaatgtctctgtagcttcctcttcactgccccagtattgctctgtatttatcagcgatgcccctctgtcactcatgccttgcctaattgttcacaatggtggaaagcttcatgtaatatgatcaggacccacctccagttcttctgaaagtgtgacagtgtccagccggttctgcagcactaggggagggggcagatggtggttgcatgggcttcctgggtctccactctccgtctggcctaaaggtgatgtatttggtgtttggccctgcagtccccactcttgaggcttaaggcgcatgtggcacaccactccttccagcagtagtcgctttactgttacctgtttaggcctagaagttttccctcatctgtaaatgtgatttaaaatctaagccatgaatatgctttatttattaaaagagttatgcggatttaatgtga

SEQ ID NO: 5942 - protein, 226 aa, Homo sapiens
MALSDADVQKQIKHMMAFIEQEANEKAEEIDAKAEEEFNIEKGRLVQTQRLKIMEYYEKKEKQIEQQKKIQMSNLMNQARLKVLRARDDLITDLLNEAKQRLSKVVKDTTRYQVLLDGLVLQGLYQLLEPRMIVRCRKQDFPLVKAAVQKAIPMYKIATKNDVDVQIDQESYLPEDIAGGVEIYNGDRKIKVSNTLESRLDLIAQQMMPEVRGALFGANANRKFLD

SEQ ID NO: 5943 - DNA, 6050 bp, Homo sapiens
gaagagtccagtgaagccgggaaccagaggctccagcaggtcatgcacgcggcggatcctctggagatccaggctgacgtgcactggactcatatccgtgagagagaggaggaagagaggatggcgccggcctctgagtcctctgcttccggagccccattggatgagaatgacctagaggaagatgtggactcagaaccagccgagatagaaggggaggcagcagaggatggggacccaggggacactggtgctgagctggatgatgatcagcactggtctgacagcccgtcggatgctgacagagagctgcgtttgccgtgcccagctgagggggaagcagagctggagctgagggtgtcggaagatgaggagaagctgcccgcctcaccgaagcaccaagagagaggtccctcccaagccaccagccccatccggtctccccaggaatcagctcttctgttcattccagtccacagcccctcaacagaggggccccaactcccacctgtccctgccgccacccaggagaaatcacctgaggagcgccttttccctgagcctttgctccccaaagagaagcccaaagctgatgccccctcggatctgaaagctgtgcactctcccatccgatcacagccagtgaccctgccagaagctaggactcctgtctcaccagggagcccgcagccccagccacccgtggcggcctccacgcccccacccagcccactccccatctgctcccagccccagccttccaccgaggccactgtcccatcccctacccagtcccccatacgcttccagcctgccccggccaaaacatccaccccactggcccctctccctgtccaaagccaaagtgacaccaaggacagactgggcagcccccttgctgtggatgaggccctcagacggagcgacctggtggaggagttctggatgaagagtgcggagatccgccgcagcctcgggctcacacctgtggaccgcagcaaggggcccgagcccagcttccccacgcctgccttcaggccagtgtccctcaaatcctattccgttgaaaagtccccccaggatgagggactccaccttctcaagcctctgtccatccccaaaaggctgggcctgccaaagccggaaggcgagccgttgtccctgccaaccccccggtccccgtccgacagagagctacgcagcgcccaggaggagcgcagggagctgtccagcagctctggcctgggcctgcacgggagctcctccaacatgaagacactgggcagccagagcttcaacacctcggactccgccatgctcacgcccccctccagcccgcccccaccgccacccccgggcgaggagcccgccaccttgcggaggaagctcagggaggccgagcccaatgcctcggtggtcccgccgcccttgcccgccacctggatgcggcccccccgggagcctgctcagccccccagagaggaggtgcggaagtcgtttgtggagagcgtggaggagattccctttgctgatgatgtggaggacacctatgacgacaagactgaggactcaagcctgcaggagaaattcttcacgcccccgtcctgctggccgcgccccgagaagcctcgccacccgcccctggccaaggagaacgggaggctgcctgctctggaggggacgctgcagccacagaagagggggctgcccttggtgtccgcggaagccaaggagttggccgaggagcgcatgcgagccagggagaagtccgtgaagagccaggcgctgcgggacgccatggccaggcagctgagcaggatgcagcagatggagctggcctcaggcgcccccaggccccgcaaggcgtcctcagcaccctcccagggcaaggagcgccggcctgactcccccacacgccccactctcaggggctccgaggagcccaccctgaagcatgaagccaccagcgaggaggtcctctccccgccgtcggactcagggggcccagatggctctttcacttcatccgagggctccagtgggaagagcaagaagaggtcgtcactcttctccccccgcagaaacaagaaggagaagaagtccaaaggcgagggccggcccccggagaagcccagctccaacctcctagaagaagccgccgccaaacccaagtccctgtggaagtccgtcttctccgggtacaagaaggacaagaagaagaaggccgacgacaagtcctgccccagcaccccctccagcggggccacggtggactctggaaagcacagggtgcttcccgtcgtaagggcagagctgcagctccggcgccagctgagcttctccgaggactcagacctctccagcgacgatgtccttgagaagtcctcacagaagtcccggcgagagccaagaacctacacggaggaggaactgaatgccaagctgacccggcgtgtgcaaaaggcagctcggagacaggccaagcaggaggagcttaagcggctgcatcgagcccagatcatccagcggcagctgcagcaggtggaggagaggcagcggcggctggaggaaaggggcgtggctgtggagaaggcgctccggggcgaagcaggcatgggcaagaaggacgaccccaagctgatgcaggagtggttcaagctagtgcaggagaagaacgccatggtgcgctacgagtcggagctgatgatctttgcccgggagctggagctggaagaccggcagagtcgactgcagcaggagctccgggaacgcatggcagtggaagatcaccttaagactgaggaggagctgtcagaagagaagcagattctcaatgagatgctggaggtggtggagcagagagactcactggtggcgctgctggaggagcagcggctccgggagagagaggaggacaaggacctggaggctgccatgctgtccaagggcttcagccttaactggtcctgagctcccacccaacgctccattttctgttggcatccgcctggccaggcagtggcatccaaaccacccggagccgcgatctgaggaggcctggcacctccttggagtttacgctcagatgcccgtgtgctgcttggaaagtggtcgagtcccgcgtgcagtggggagccccaggtgacagtggttatctgagacggctccacctcctgggaggaggcccacctggacctcccactcagaggagcagcacggcgtgtatggcatgacgcaggggaccaccccgcgcgctccctgaggatgtgctggctgtgccccttttttccactggcacatttggtaagagagggaagctgctccccgtcagaaccacagtgcgccgtgcgaggggcactgtcttcttcatgctccctggagcaccaccaaagaaacgtaaacaataccccacgaaagcagggtcaggggtcagggtgcgatcgagacccaggatgggggcgtccagtcatgcccaccccagcatcacaggagacatggaggtgcgggcaggctcctgaattattatgcaaattaggaggacgcaggaggggtctgccctccagccgaacaccacacactggaccctaagtggccaaatgcctgggccgcttgctggctgtggcctgaggcttgtgggttgctgcattttgcttgtagttcacaaccattttgacactggaaaatgctgactttgggggacaggatgaggccctacattctaagcccccagttggcagacaggcattgtccctgttccacatttatgtcgggacaggagatgaccttttcctccgtgtttttcctgtgtttgcacgttgaaatgaagctgacaacctggcaagacgctcagccgcttcaaaccctttttgtcaattaacttattttttaatacttgaaaagaagtaacttcgtttgtgtatctttactagaggaactgatcacctgcgcccgggtgcgggagccacagcggcatctggtgcgtcctacgcgacctggtccggggctgcccggtgctcctcacgtgcatctatttattagcctttctcttcgtatcactggcctggctggcatcagggagctgcccagaacccctgtgtgggtcctcctcacagctttctgtcccctcctccacccggtgcctgcctcaccctggcgctagaccatctggaccactcatgtgatgagggtgcatttccgttctgttttgggccaggccaacagcagagctgccactctcaccctcccagtgagaattccggctctgcagaactcgcccttgtctcagtttgggggccagggcatcaccttcctccgcacatatgttaaagaaggtttcaggatgggccctcatccacacaggccaagagggtgcaaggtgggaccctggaatcatgtggctggtgagaattccctcctcccagcctaagattcacccagacggaaacgcgagtgctgcagtggatgctgggatgcaggctggtgcctctcaagcagatcagcgactcccgcccttccttccgaaggcgacgggcacctgccttgtgccggatcttcatggggacataaagggcgagccccgaatcactagctcctatagccaaactgttcctttctcacggttccgcaccagcctggctgtgtacagctcatcaagccactgagctaatcggggtggggtgcttgtccatcaaagcagtcagcacatagcccagcgaggagccatccggaccagacccgcctgccaggggcgctccagccgcctgccgcctccgtgggctggggccagctgggagcagaggcctggcccctccaaggcgtcccgcagtggagcaggctgagtggctgtgctgaccttgggctttccatgggaaccacactgtgcttcaacttgaacattcatcccagctgcaaaggagcaaagaacctgtgtcatccttgtctgtccagaagctgccatctctctcccatgcacatccgggagataacgccgctagtggccgccacagcgctgattctccacctgttctcacgtgaggcaaaggtctccttttcttttctctttacttaaaaaaggggagaggagggtttctagattccatcttcaaaccccagtcgtcccataaaattggacgtgggaaaagaccttcactgcctgcgtggcctttcccagacctctcctcgaatgccacaaaaccggtccagccccggcagagccgccttcggcccttgtagctcctgctggccccacaacagggaaacagtttgcaaagtggcttggaaggagtgtggcctagggatctgctgtaagtggccagacgtagcaggagagcccagtgtcaccttctggtcctggtcagccttaacactgtggcatcctccacagcacacacggcagcctgcagtctggaaggtggacccgagcctttgcagagaggcgccgcagagccgcaggcctgcgccccagccttctgctcccgactgtgaggacacccagttctagtagagcactttttttaaagctcccattttgtaaccactagtttgcggttgacttgagtactctggtgacttcctgcgtcaagcgttctcaagctgtgagaatgtgcgcagctccaggcaggttttctctcggagagttaagtcttcccttgaaggcagggaagcaggatggatacacatatatcacacgcataaaacaccaggtgcgggagcagcccagactcaaggctgactaaactggaggctgaataccgtggaggtccacatgcagcttccctggagggcaggccggaggcgctcccgcccctgggcttgaggatgctgcaccccgtgggcttccaggcctgcccagatgatgccttcaggcctctgtccctggcggccatcctcaggccgattttgaccagcaatgatagactcttcttaaccctttcaaaataaatttttcagtgggacagaaaggagagttaaaaaacatttttttaaaggtggtaacatctgacccacaaagggaatgggtctgttttatgcaaaataaaagtttttcaaat

SEQ ID NO: 5944 - protein, 975 aa, Homo sapiens
MHAADPLEIQADVHWTHIREREEEERMAPASESSASGAPLDENDLEEDVDSEPAEIEGEAAEDGDPGDTGAELDDDQHWSDSPSDADRELRLPCPAEGEAELELRVSEDEEKLPASPKHQERGPSQATSPIRSPQESALLFIPVHSPSTEGPQLPPVPAATQEKSPEERLFPEPLLPKEKPKADAPSDLKAVHSPIRSQPVTLPEARTPVSPGSPQPQPPVAASTPPPSPLPICSQPQPSTEATVPSPTQSPIRFQPAPAKTSTPLAPLPVQSQSDTKDRLGSPLAVDEALRRSDLVEEFWMKSAEIRRSLGLTPVDRSKGPEPSFPTPAFRPVSLKSYSVEKSPQDEGLHLLKPLSIPKRLGLPKPEGEPLSLPTPRSPSDRELRSAQEERRELSSSSGLGLHGSSSNMKTLGSQSFNTSDSAMLTPPSSPPPPPPPGEEPATLRRKLREAEPNASVVPPPLPATWMRPPREPAQPPREEVRKSFVESVEEIPFADDVEDTYDDKTEDSSLQEKFFTPPSCWPRPEKPRHPPLAKENGRLPALEGTLQPQKRGLPLVSAEAKELAEERMRAREKSVKSQALRDAMARQLSRMQQMELASGAPRPRKASSAPSQGKERRPDSPTRPTLRGSEEPTLKHEATSEEVLSPPSDSGGPDGSFTSSEGSSGKSKKRSSLFSPRRNKKEKKSKGEGRPPEKPSSNLLEEAAAKPKSLWKSVFSGYKKDKKKKADDKSCPSTPSSGATVDSGKHRVLPVVRAELQLRRQLSFSEDSDLSSDDVLEKSSQKSRREPRTYTEEELNAKLTRRVQKAARRQAKQEELKRLHRAQIIQRQLQQVEERQRRLEERGVAVEKALRGEAGMGKKDDPKLMQEWFKLVQEKNAMVRYESELMIFARELELEDRQSRLQQELRERMAVEDHLKTEEELSEEKQILNEMLEVVEQRDSLVALLEEQRLREREEDKDLEAAMLSKGFSLNWS

SEQ ID NO: 5945 - DNA, 2211 bp, Homo sapiens
cgggaagatggcgggccgggcgacttgagatccgcgggtctccctgctccttttccgtctgcgtcgggagctcccgggcacgtgaggccgtgccgcgtttactggcgggagggacggcctagccgggcgacgcctcggaggaggccgcggaccccttaggtgctgggcccttggaaatcggcgcgtggggggcggtgctcgagctgagcgcgagagggcgggagagctcgtggggtgcgagaggagcaggacgcccggccgggcagcatgagtcagcagcggccggcgaggagattacccagtctcctcctgcacccgacggaggagaccccatcaacgtggagggcctgctgccatcaaaaataaggattaatttagaagataatgtacaatatgtgtccatgagaaatctgctcccgggggtattcttgacttaaacaaggttgcaacgaaactgggagtccgaaagcggagagtgtatgacatcaccgatgtcttagatggaatcgacctcgttgaaaagaaatccaagaaccatattagatggataggatctgatcttagcaattttggagcagttccccaacaaaagaagctacaggaggaactttctgacttatcagcaatggaagatgctttggatgagttaattaaggattgtgctcagcagctgtttgagttaacagatgacaaagaaaatgaaagactagcatatgtgacctatcaagacattcatagcattcaggccttccatgaacagatcgtcattgcagttaaagctccagcagaaaccagattggatgttccagctcccagagaagactctatcacagtgcacataaggagcaccaacggacctatcgatgtctatttgtgagaagtggagcagggtcagaccagtaacaaaaggtctgaaggtgtcaggacctcttcatctgagagcactcatccagaaggccctgaggaagaagaaaatcctcagcaaagtgaagaattgcttgaagtaagcaactgatggcatttgagaatttatgtatcactgagttttttgggaatatcttcgtggagaattacgcatcaaatttgattctcagagcaataaattatccatgaagtgctctcgttctcagtagcggcatcatggccagtagtgtctttgaggagttcaccacttagattactgagtaattgtggtttccacatttgaaaacaactccttttataattattcactgctttttgtcagtgaaatagacatcttgcctcctgaagtagcttcatcacagagtgtcatgaagacagacagtcaggctgaaaaggacagttctttgtggactctacccttcccttcaaggagtatgtcatatgtcacaaaagaaattgccttacactggttcatgtttgcagttactgttgtacattgcatagatgtacacacgaatttaaatgtgatgtctttgtatatatctgtataatgttgagattacttacgaaatatgtctgagtgacacttttcactcttgtacagccaaaataatgtatatatggaaaatgacagacaaattctctaatctctttggtatctataacttattagaatcctctggatgagggttagaagagactttttccaaacttctacatgtagaagtatcataaatgtgctacacatttatgtttgtggatttaattaaagtattttaatatggttttcagtgctaaaattggagtcagatacttcttggttttaagctgtctacctaattgctgtctcccagcagatcggtggcatgcccagtggctttgggggcaaggatagaaatgccatcaggaaatagctgaattcattgtgaaacatgaattcagtcatggtgataattggaaactcctttcaggtttttgcaagtagattttgtaatgtttgtgtatgcagccttgctgttgagtcagtccaaggggttttacttaggacaagttgtaccttgccctctctccagctctgctcccacattttcacatacctagctatttctacctcattgggtaagtcatttaccactctgtgcctcagtttactctgtagtttaccattagactgtgagctccttgagggactttgtcataatcactgttacatcccagtgcctcacactatgcctggcccttaagaagtgctcaataaatgtctgaacaaaaaaaaaaaaaaaaaaa

SEQ ID NO: 5946 - DNA, 1817 bp, Homo sapiens
ggggcctggctcggaccacgcggggcgggacctggagctgacgcggccgccccgcccctgggaccataaccggccgccgccgccaccgcggaccgagcgcggagttctggagtctcggacccgaagccgccacagggcgccccgcctcccgcccgccatgcccgcgccccgcgccccgcgcgctctggcggccgccgcgcccgcgtccgggaaggccaagctgacgcacccggggaaggcgatcctggcaggcggcctggcgggtggcatcgagatctgcatcaccttccccaccgagtacgtgaagacgcagctgcagctggacgagcgctcgcacccgccgcggtaccggggcatcggggactgcgtgcggcagacggttcgcagccatggcgtcctgggcctgtaccgcggccttagctccctgctctacggttccatccccaaggcggccgtcaggtttggaatgttcgagttcctcagcaaccacatgcgggatgcccagggacggctggacagcacgcgtgggctgctgtgcggcctgggcgctggcgtggccgaggccgtggtggtcgtgtgccccatggagaccatcaaggtgaagttcatccacgaccagacctccccaaaccccaagtacagaggattcttccacggggttagggagattgtgcgggaacaagggctgaaggggacgtaccagggcctcacagccactgtcctgaagcagggctcgaaccaggccatccgcttcttcgtcatgacctccctgcgcaactggtaccgaggggacaaccccaacaagcccatgaaccctctgatcactggggtcttcggagctattgcaggcgcagccagtgtctttggaaacactcctctggatgtgattaagacccggatgcagggcctggaggcgcacaaataccggaacacgtgggactgcggcttgcagatcctgaagaaggaggggctcaaggcgtgagtgggggaggggcagggctattgtccccacctcaaacctttcccggcctacctggcctgcccactctgtccccttcaggcctctgtgcctctcacttcagtatctggggattgccctgtgcagggacactgtgctgacctgccttcctctccccgcccctcctcccacccagattctacaagggcactgtcccccgcctgggccgggtctgcctggatgtggccatagtgtttgtcatctatgatgaagtggtgaagctgctcaacaaagtgtggaagacggactaagcctagagaggccgcaaggggaccgccccaggcaccgccagagtgtcctgctacctttgtctcacgattccagtgcagtagtgccaaaaggccccttcccacgtccctcgagctctgtagcctggtctgtgcattgtggctgtcaaatccatgtgtcccccctgtggtctgtgtgtgacaccaccactgtgtcccagtgtctggcccagccatggctggatgtgcatctggcctatgaccctgtgcctgtgtttcatgttctgtgtcacgtgaccctgtgccccgcctcccggggtgcccgtgtggcctgggtcctcggccctgtagccctggcccggtcccagtccggtgccttccaccctgccctggcctaccacagctgcctccgggcctcggcctggcttcaccgcattccaggggctgcagccccctgcttctcccgccattggccttaactggccctcgggccctctctccgccccggacagggtggcacccaccactctcaggaccaccctgccaaggcagaataaaccggatcctgttgc

SEQ ID NO: 5947 - DNA, 955 bp, Homo sapiens
agtaagccgggctgccgtcttctcgccatgggctccgggccgcgcggggcgctgagcttactgctcctgctgctggccccgccgagccgcccggccgcaggttgcccggcgccctgtagctgcgcggggacgctcgtggactgcgggcgccgcgggctgacttgggcctcgctgccgaccgccttccctgtcgacacaaccgagctggtgctgaccggcaacaacctgacggcgctgccgccggggctgctggacgcgctgcccgcgctgcgcaccgcacacctgggcgccaacccctggcgctgcgactgccgccttgtgccgctgcgcgcctggctggccggccgccccgagcgtgcgccctaccgcgacctgcgttgcgtggcgcccccagcgctgcgcggccgcctgctgccctatctggccgaggacgagctgcgcgccgcttgcgctcccggcccgctctgctggggggcgctggcggcgcagcttgcgctgctgggccttgggctgctgcacgcgttgctgctggtgctgctgctgtgccgcctgcggaggctgcgggcccgggcccgcgctcgcgccgcagcccggctgtcgctgaccgacccgctggtggccgagcgagccggaaccgacgagtcctgaggagagaaccggtgcgtcctgaggagagaaccggcgctgggcaacacgggcctgcaaactcgacaggaccctgcccgaggggccctcgcgccaacctggaccggtccccgcctcctccgctgcccaatctctcagacccaccccacctgcaggcccagaccacgtgggacagaactcctgcccaccctaccccgagggaggcgaacccgcacttccaggcttgggaggaccatggggcacaatgcggtccagaccctgctgcgtctcccttccaaactctggtgctgaataaacccttctgatctgg

SEQ ID NO: 5948 - protein, 206 aa, Homo sapiens
MGSGPRGALSLLLLLLAPPSRPAAGCPAPCSCAGTLVDCGRRGLTWASLPTAFPVDTTELVLTGNNLTALPPGLLDALPALRTAHLGANPWRCDCRLVPLRAWLAGRPERAPYRDLRCVAPPALRGRLLPYLAEDELRAACAPGPLCWGALAAQLALLGLGLLHALLLVLLLCRLRRLRARARARAAARLSLTDPLVAERAGTDES

SEQ ID NO: 5949 - DNA, 688 bp, Homo sapiens
cccaagatgccaaaaggaaagaaggccaagggaaagaaggtggctctggcccctgctgtcatgaagaagcaggaggctaagaaagtggtgaatcccctgtttgagaaaaggcctaagaattttggcatcggacaggacatccagcccaaaagagacctcacccactttgtgaaatggccccgctatatcaggctgctggcaaacgggacgtccccaccaagagaccacctgtccttcgagcaggagttaacatcgtcaccaccttggtggagaacaagaaagctcagctggtggtgattgcagacgacgtggatcccatcgagctggttgtcttcttgcctgccttgtgtcgtaaaatgggggtcccttactgcattatcaaggggaaggcaagactgggacgtctagtccacaggaagacctgcaccactgtcaccttcacataggtgaactcggaagacaaaggcactttggctaagctgatggaagctatcaggaccaattacaatgacagatacgatgagatccgccgtcactggggcggcaacatcctgggtcctaagtctgtggctcgtatcgccaagctcgaaaaggcaaaggctaaagaacttgccactaaactgggttaaatgtacactgttgagttttctgtacattaaaataattaaaataatacaaattttccttc

SEQ ID NO: 5950 - DNA, 2581 bp, Homo sapiens
ctgccgtgtgtctgagggccagtcatgcagcatccacctaggcaggcttgagagtccttgggagagtccaggtgacctggtttttaattaaaacgcgtcctgtttattgtggttgggctctgcccagaaaggaaggtagggccttgaagtggtgatgtccaggtttcctgcacaggtagggtggaggcaacgatggactctggcatggccttccagacaggcagtgcacacagctcctttcagagtggctttgttgccagctgctgcagcacctgctttcagacagatgatgaccaagctgctttcctgctgggggaaggaggcattccccctgggttgtttttctcttctggcccccacacactggcagacccgaaggcagggtgctcaggagctgcagagcctggcagggtttgctggacatgctcagggacgggccatggtgctggctctgctttctaatcatggtgtcagtccttcacttcccttggaaatacccagagattttatttcctgaagataggacatgatgggtgctgtgagatggtatttaaagtacctgtctgcaaggaaaactttaaaataggaagtactaaggataaggtcctatgggatattggaatattttataaagccacaatagttaaagcacttagatgtggacagatgagcagagaatagaggactttgaaacgggccaaataaatatggaaatttagtacaggctagaggtgtttccaattaacgagtaaaatggattattcagtaaaagcagttggccctctggaaaatagtaaagccatgtatgtgcctcactctttatgccagtacatattccagattaaagatttcaatgttacaattatgaaagtactagaggaaaatatgggtgaatttttttttttttttttttttgcctatgattccaggattttaaaagttttagatgcccagagttgtggaggtatggagaagtggaccttctcatactgttggtgggaatacacaataatataatttgaccacgtaacaattctaggcacatgcatgctgtgactacttgctaggtgcatgaaggctcttgccaggggtggtcatggttcggtaccactacatgggggtttagagcagggactggaggttggccttgcctcctcccctccccgcatgagctgagggtccttacctgacctttttgagctgtgaccagagtttttcctcatggggtggttagaagggttgaatgagaatgatgcccatgcagtgccttggctggggtctgggccctctaacacccacctcatgggtgtcactgttttttgaacagcagaactggaaaagcccaaagatccagcaataaaggagcaaggcaaataaagctgttaccctgcaggatcagtcagcatgagccagattgtgctgcagtaacaaagatctccaacagcgcagcggctacagttggcactgcttatttcttgcttgcacctgtgggccaccgtggctggggcctgtcagacctgtgctgacgacagcctacctggacatatttctccatgctcactgaggcaggggaaaggccacagcaggccacaagtaatgtgtgtcaccccacttccatttctgtggccaaaggaagccacagagccacacctgagttccataggacggcagcagctgatcatcctatgggctggggtgctcagtatggagaagtacaagcagccacccagcgtggggctggttggtgctgctgaggatgggaggatgggaggggcctgcatccatcccagggcaacatacctgtttgtctgctggggctgcctgacaaaggaccgcaggctaggggacttaaacaacagacatttcctcatgattctggagctagaagcctgagatcaaggtgtgggcagggttggtttctcctgaggcctcgctccttggcctgcagatagccatcttcttgccgtgtccctgtctgtgtctgtgtcctaatctctcataagctcactagtctattggatcagggcccaccctcatgacctcatttaaccctgaattacctctttaaagaccctgtcttcaaatgtaagtactaggggttaggacttgaacataaaaatattgaagggacatagttctgcccacagcggtgcccgcgataggcttctctggttttgtctttgctgttcctggcagcgctatattgggcaggcttctgtggtctccacatgcctgtgtgcagagtcccccaggccctgggttctggggcccatactgaggagtggggatggccaagccttggctgttgagtaggcagtgcccagttgtgctgtatgggatgctgtttctcacttaagaaatctttccctacctggggggtacaaaggcattatcctgtattcccaggttgtaactttctgcctttgacattcaaccttgagtccacctgtaagtgtaactgcggcagaagggaggggtctgctgtcatccttgatagcctgtgatgagcagagcccctctgccgaccgcgatgcacatgtaatatgagcaagaaataaatttttgatgtgcgaagccactg

SEQ ID NO: 5951 - DNA, 2072 bp, Homo sapiens
ggcacgaggctcccctgtgctcccagcatgcctcgtggccggtgccgtcagcagggccctcgcattcccatctgggcagccgccaattatgccaacgcacatccatggcagcagatggacaaggcgtctcctggggtggcatacaccccccttgtggatccctggattgagcggccctgctgtggggacaccgtgtgtgtgcgaacgaccatggagcagaagagcacagctagtggcacttgtggcggtaaacctgcagaaaggggtcccctagctgggcacatgcccagctcccgaccccacagggtggacttctgctgggtaccaggctcagacccaggcacctttgatggctccccgtggctactggaccgcttcttggcccagctgggcgattacatgtccttccactttgagcactatcaggacaacatcagccgtgtctgcgagatcctcaggcgcctaacaggccgagcccaggcctgggcagccccctaccttgatggggacctgcccctgcctgacgattacgagctcttctgccaggatctcaaggaagttgttcaagacccgaacagttttgctgagtaccatgctgtggttacctgtcccctgcccctggcctccagccagctgccagtggcccctcagctgcctgtggtgaggcaatacttagctaggttcttagagggcctggcactcgacatgggtactgcccccaggtctttaccagccgccatggccacccctgctgtgtctgggtccaactctgtatctagaagtgctctgttcgagcagcagctgaccaaggagagcacccctgggcccaaggagcccccagtcctgcccagttctacatgtagctccaagcctggtcctgtggaaccagcctcttcccagccagaggaggcagcccccacacctgtccctagactgtcggagtcagctaatcctcctgcccagagaccagacccagctcatccaggaggtccaaaaccccagaaaacagaggaggaggttttggagacagagggagaccaggaggtgtccttaggtaccccacaggaggtggtggaggccccggagaccccaggagagccaccactttctcctgggttctgaacacagcccaggtgggaacaatgctgcccctcatgatgaagtggcctgtgtggcttgagcgccccatagtccccagtcagagcagagtggtgtccccagatgacttcagaccccatagctgggcaagatgcgcttgttttggactctgcgctgagcagaaccagctcccccaactccagcagagcttgacctccgccctgtgccctttccctgctgctggctctctgctgcatccctgcccgtcttctgggagtgccgtctcacccaggcctgctcccacgagggggtcgttttgtagatcaactctcagcagatagttgcatcatctttgtcacctccacccccataaaacaccccccttggtgtcttccacactggctgggactgaactgggtctgccacgtctgccctgttgggacctcgttcctgtatggggtttctgtgtctgtccccctagccccaccctctctgctccctgtgacttctgtcccagctggaatgtgaggaaggctgcctggaggaagtggccactttgattctgggggatgagtgggatagcatcttggcaaagaatgatgtttcctgtgggattaccagcagttctgggcagctggaaggtttggatgcaggaaggtgggatgcaagccccttgccaggctcagctgcaggcattcgccctttgtgtgttaacactgtagctctaatcgtgcctggtgttctgaagcaggctcctcttccctgctgctgtgctgccatcccctgctcactccgcactcgcatgcattgcggattcagcacttaagccctagtgtgtaaatgacttggatctccctcctggcagactgtgaccctcagcacaggggctctgtcttagtcagctctgtggcctggtacacaattggtgctcattaaacacgtgttggattactggcaaaaaaaaaaaaaaaaaa

SEQ ID NO: 5952 - protein, 303 aa, Homo sapiens
MEQKSTASGTCGGKPAERGPLAGHMPSSRPHRVDFCWVPGSDPGTFDGSPWLLDRFLAQLGDYMSFHFEHYQDNISRVCEILRRLTGRAQAWAAPYLDGDLPLPDDYELFCQDLKEVVQDPNSFAEYHAVVTCPLPLASSQLPVAPQLPVVRQYLARFLEGLALDMGTAPRSLPAAMATPAVSGSNSVSRSALFEQQLTKESTPGPKEPPVLPSSTCSSKPGPVEPASSQPEEAAPTPVPRLSESANPPAQRPDPAHPGGPKPQKTEEEVLETEGDQEVSLGTPQEVVEAPETPGEPPLSPGF

SEQ ID NO: 5953 - DNA, 631 bp, Homo sapiens
tgaacacagcccaggtgggaacaatgctgcccctcatgatgaagtggcctgtgtggcttgagcgccccatagtccccagtcagagcagagtggtgtccccagatgacttcagaccccatagctgggcaagatgcgcttgttttggactctgcgctgagcagaaccagctcccccaactccagcagagcttgacctccgccctgtgccctttccctgctgctggctctctgctgcatccctgcccgtcttctgggagtgccgtctcacccaggcctgctcccacgagggggtcgttttgtagatcaactctcagcagatagttgcatcatctttgtcacctccacccccatcgtctgccctgttgggacctcgttcctgtatggggtttctgtgtctgtccccctagccccaccctctctgctccctgtgacttctgtcccagctggaatgtgaggaaggctgcctggaggaagtggccactttgattctgggggatgagtgggatagcatcttggcaaagaatgatgtttcctgtgggattaccagcagttctgggcagctggaaggtttggatgcaggaaggtgggatgcaagccccttgccaggctcagctgcaggcattcgccctttg

SEQ ID NO: 5954 - DNA, 2180 bp, Homo sapiens
attccccacaccctatcccagtgttccaccctaggtctgaaggcccccgccccgaatccggccgcattcggccccggtctagccagcgctctcacctctcccgcgacggcccgcccgggactggacccgccccggtccggcgcaggcagcgcggcgggcagccctagctgccccagaagccccacgacgatggcggcaatggcggtggcgctgcggggattaggagggcgcttccggtggcggacgcaggccgtggcgggcggggtgcggggcgcggcgcggggcgcagcagcaggtcagcgggactatgatctcctggtggtcggcgggggatctggtggcctggcttgtgccaaggaggccgctcagctgggaaggaaggtgtccgtggtggactacgtggaaccttctccccaaggcacccggtggggccttggcggcacctgcgtcaacgtgggctgcatccccaagaagctgatgcaccaggcggcactgctgggaggcctgatccaagatgcccccaactatggctgggaggtggcccagcccgtgccgcatgactggaggaagatggcagaagctgttcaaaatcacgtgaaatccttgaactggggccaccgtgtccagcttcaggacagaaaagtcaagtactttaacatcaaagccagctttgttgacgagcacacggtttgcggcgttgccaaaggtgggaaagagattctgctgtcagccgatcacatcatcattgctactggagggcggccgagataccccacgcacatcgaaggtgccttggaatatggaatcacaagtgatgacatcttctggctgaaggaatcccctggaaaaacgttggtggtcggggccagctatgtggccctggagtgtgctggcttcctcaccgggattgggctggacaccaccatcatgatgcgcagcatccccctccgcggcttcgaccagcaaatgtcctccatggtcatagagcacatggcatctcatggcacccggttcctgaggggctgtgccccctcgcgggtcaggaggctccctgatggccagctgcaggtcacctgggaggacagcaccaccggcaaggaggacacgggcacctttgacaccgtcctgtgggccataggtcgagtcccagacaccagaagtctgaatttggagaaggctggggtagatactagccccgacactcagaagatcctggtggactcccgggaagccacctctgtgccccacatctacgccattggtgacgtggtggaggggcggcctgagctgacacccatagcgatcatggccgggaggctcctggtgcagcggctcttcggcgggtcctcagatctgatggactacgacaatgttcccacgaccgtcttcaccccgctggagtatggctgtgtggggctgtccgaggaggaggcagtggctcgccacgggcaggagcatgttgaggtctatcacgcccattataaaccactggagttcacggtggctggacgagatgcatcccagtgttatgtaaagatggtgtgcctgagggagcccccacagctggtgctgggcctgcatttccttggccccaacgcaggcgaagttactcaaggatttgctctggggatcaagtgtggggcttcctatgcgcaggtgatgcggaccgtgggtatccatcccacatgctctgaggaggtagtcaagctgcgcatctccaagcgctcaggcctggaccccacggtgacaggctgctgagggtaagcgccatccctgcaggccagggcacacggtgcgcccgccgccagctcctcggaggccagacccaggatggctgcaggccaggtttggggggcctcaaccctctcctggagcgcctgtgagatggtcagcgtggagcgcaagtgctggacaggtggcccgtgtgccccacagggatggctcaggggactgtccacctcacccctgcacctctcagcctctgccgccgggcacccccccccaggctcctggtgccagatgatgacgacctgggtggaaacctaccctgtgggcacccatgtccgagccccctggcatttctgcaatgcaaataaagagggtactttttctgataaaaaaaaaaaaaaaaaaaaaaaaaaaaaaaaaaaaaaaaaaaaaaaaaaaaaaaaaaaaaaaaa

SEQ ID NO: 5955 - protein, 524 aa, Homo sapiens
MAAMAVALRGLGGRFRWRTQAVAGGVRGAARGAAAGQRDYDLLVVGGGSGGLACAKEAAQLGRKVAVVDYVEPSPQGTRWGLGGTCVNVGCIPKKLMHQAALLGGLIQDAPNYGWEVAQPVPHDWRKMAEAVQNHVKSLNWGHRVQLQDRKVKYFNIKASFVDEHTVCGVAKGGKEILLSADHIIIATGGRPRYPTHIEGALEYGITSDDIFWLKESPGKTLVVGASYVALECAGFLTGIGLDTTIMMRSIPLRGFDQQMSSMVIEHMASHGTRFLRGCAPSRVRRLPDGQLQVTWEDSTTGKEDTGTFDTVLWAIGRVPDTRSLNLEKAGVDTSPDTQKILVDSREATSVPHIYAIGDVVEGRPELTPIAIMAGRLLVQRLFGGSSDLMDYDNVPTTVFTPLEYGCVGLSEEEAVARHGQEHVEVYHAHYKPLEFTVAGRDASQCYVKMVCLREPPQLVLGLHFLGPNAGEVTQGFALGIKCGASYAQVMRTVGIHPTCSEEVVKLRISKRSGLDPTVTGCRV

SEQ ID NO: 5956 - DNA, 1289 bp, Homo sapiens
caccgccattgccgccatcgtcgtggggcttctggggcagctagggctgcccgccgcgctgcctgcgccggaccggggcgggtccagtcccgggcgggccgtcgcgggagagaaataacatctgctttgctgccgagccagaggagaccccagacccctcccgcagccagagggctggagcctgctcagaggtgctttgaagatgccggaggccccgcctctgctgttggcagctgtgttgctgggcctggtgctgctggtggtgctgctgctgcttctgaggcactggggctggggcctgtgccttatcggctggaacgagttcatcctgcagcccatccacaacctgctcatgggtgacaccaaggagcagcgcatcctgaaccacgtgctgcagcatgcggagcccgggaacgcacagagcgtgctggaggccattgacacctactgcgagcagaaggagtgggccatgaacgtgggcgacaagaaaggcaagatcgtggacgccgtgattcaggagcaccagccctccgtgctgctggagctgggggcctactgtggctactcagctgtgcgcatggcccgcctgctgtcaccaggggcgaggctcatcaccatcgagatcaaccccgactgtgccgccatcacccagcggatggtggatttcgctggcgtgaaggacaaggtcacccttgtggttggagcgtcccaggacatcatcccccagctgaagaagaagtatgatgtggacacactggacatggtcttcctcgaccactggaaggaccggtacctgccggacacgcttctcttggaggaatgtggcctgctgcggaaggggacagtgctactggctgacaacgtgatctgcccaggtgcgccagacttcctagcacacgtgcgcgggagcagctgctttgagtgcacacactaccaatcgttcctggaatacagggaggtggtggacggcctggagaaggccatctacaagggcccaggcagcgaagcagggccctgactgcccccccggcccccctctcgggctctctcacccagcctggtactgaaggtgccagacgtgctcctgctgaccttctgcggctccgggctgtgtcctaaatgcaaagcacacctcggccgaggcctgcgccctgacatgctaacctctctgaactgcaacactggattgttcttttttaagactcaatcatgacttctttactaacactggctagctatattatcttatatactaatatcatgttttaaaaatataaaatagaaattaa

SEQ ID NO: 5957 - protein, 271 aa, Homo sapiens
MPEAPPLLLAAVLLGLVLLVVLLLLLRHWGWGLCLIGWNEFILQPIHNLLMGDTKEQRILNHVLQHAEPGNAQSVLEAIDTYCEQKEWAMNVGDKKGKIVDAVIQEHQPSVLLELGAYCGYSAVRMARLLSPGARLITIEINPDCAAITQRMVDFAGVKDKVTLVVGASQDIIPQLKKKYDVDTLDMVFLDHWKDRYLPDTLLLEECGLLRKGTVLLADNVICPGAPDFLAHVRGSSCFECTHYQSFLEYREVVDGLEKAIYKGPGSEAGP

SEQ ID NO: 5958 - DNA, 1067 bp, Homo sapiens
gctgttggcagctgtgttgctgggcctggtgctgctggtggtgctgctgctgcttctgaggcactggggctggggcctgtgccttatcggctggaacgagttcatcctgcagcccatccacaacctgctcatgggtgacaccaaggagcagcgcatcctgaaccacgtgctgcagcatgcggagcccgggaacgcacagagcgtgctggaggccattgacacctactgcgagcagaaggagtgggccatgaacgtgggcgacaagaaaggcaagatcgtggacgccgtgattcaggagcaccagccctccgtgctgctggagctgggggcctactgtggctactcagctgtgcgcatggcccgcctgctgtcaccaggggcgaggctcatcaccatcgagatcaaccccgactgtgccgccatcacccagcggatggtggatttcgctggcgtgaaggacaaggtcacccttgtggttggagcgtcccaggacatcatcccccagctgaagaagaagtatgatgtggacacactggacatggtcttcctcgaccactggaaggaccggtacctgccggacacgcttctcttggaggaatgtggcctgctgcggaaggggacagtgctactggctgacaacgtgatctgcccaggtgcgccagacttcctagcacacgtgcgcgggagcagctgctttgagtgcacacactaccaatcgttcctggaatacagggaggtggtggacggcctggagaaggccatctacaagggcccaggcagcgaagcagggccctgactgcccccccggcccccctctcgggctctctcacccagcctggtactgaaggtgccagacgtgctcctgctgaccttctgcggctccgggctgtgtcctaaatgcaaagcacacctcggccgaggcctgcgccctgacatgctaacctctctgaactgcaacactggattgttcttttttaagactcaatcatgacttctttactaacactggctagctatattatcttatatactaatatcatgttttaaaaatataaaatagaaattaa

SEQ ID NO: 5959 - protein, 221 aa, Homo sapiens
MGDTKEQRILNHVLQHAEPGNAQSVLEAIDTYCEQKEWAMNVGDKKGKIVDAVIQEHQPSVLLELGAYCGYSAVRMARLLSPGARLITIEINPDCAAITQRMVDFAGVKDKVTLVVGASQDIIPQLKKKYDVDTLDMVFLDHWKDRYLPDTLLLEECGLLRKGTVLLADNVICPGAPDFLAHVRGSSCFECTHYQSFLEYREVVDGLEKAIYKGPGSEAGP

SEQ ID NO: 5960 - DNA, 4435 bp, Homo sapiens
ggcggtcggtcggtgaggctttcccggctgtggtttggctgcgggcggcttgggcagcccgcgggcgcctcaggtagaagaagaaaggtgccactccggcatgaagacagactcgcttagtcgccagtcacttaagctgagtgcattgtgatttccaataattgaggcagtggttctaaaagctgtctacattaatgaaaagagcaatgtggccagcttgactaagccgccagcgcacagcgcggcaggacgcgcccgggtctcagcggacttgtgcatgttagctgtgtagatttatgtgagggcttgtaaaactctggtcttgtaaactagtcttaagcgcttttaatatggagacagatgagagcccctctccgctcccgtgtgggcccgcaggagaagcggtgatggagagccgagctcgccccttccaagcgctgccccgtgagcagtctccaccacctcccctgcaaacgtccagtggtgcagaggtaatggacgttggctctggtggtgatggacagtccgaactccctgctgaggaccccttcaacttctacggagcttctcttctctccaaaggatccttctctaagggccgcctcctcatagacccgaactgtagtggccacagcccgcgcaccgcccggcacgcacctgcggtccggaagttctcccctgaccttaagttgcttaaggatgtaaagattagcgtgagctttaccgagagctgcaggagtaaggacaggaaggtgctgtacacaggagcagagcgcgacgtgcgggcggagtgcggtctgctccttagccctgtcagtggggacgtgcatgcttgtccctttggcgggagtgttggtgacggggtaggcatagggggtgagagtgctgataagaaggatgaggagaatgagctggatcaggaaaagagagtggagtatgcagtgctcgatgagttagaagattttactgacaatttggagctagatgaagaaggagcaggcgggttcacggctaaagcaatcgttcagagagacagagtggatgaagaggccttgaatttcccctacgaggatgactttgacaacgatgtggatgctctgctggaagaaggcctttgtgcccccaaaaagaggcgaacagaggaaaaatatggcggagacagcgaccatccgtccgatggagagacaagtgtgcagccgatgatgaccaagattaaaacagtgctcaaaagtacgtggccgcccacctacagagccgctgcccgacgggtggatcatgacattccataactctggagtcccggtgtacctacacagagagtctcgggtggtcacctggtccaggccatacttcttgggaacgggaagcatacggaaacacgaccctcctctgagtagcatcccttgtctgcattataagaaaatgaaggacaacgaggaacgggagcaaagcagtgacctcacccctagtggggatgtgtcccccgtcaagcccctgagccgatctgcagagctggagtttcccctggatgagcctgactctatgggtgctgacccggggcccccggacgagaaagacccactaggggctgaggcagcccctggggccctggggcaggtgaaggccaaagtcgaggtgtgcaaagatgaatccgttgatctcgaggaatttcgaagctacctggagaagcgttttgactttgagcaagttactgtgaaaaaattcaggacttgggctgagcggcggcaattcaatcgggaaatgaagcggaagcaggcggagtccgagaggcccatcttgccagccaatcagaagctcattactttatcagtgcaagatgcacccacaaagaaagagtttgttattaaccccaacgggaaatccgaggtctgcatcctgcacgagtacatgcagcgtgtcctcaaggtccgccctgtctataatttctttgaatgtgagaacccaagtgagccttttggtgcctcggtgaccattgatggtgtgacttacggatctggaactgcaagcagcaaaaaacttgcgaagaataaagctgcccgagctacactggaaatcctcatccctgactttgttaaacagacctctgaagagaagcccaaagacagtgaagaactcgagtattttaaccacatcagcatcgaggactcgcgggtctacgagctgaccagcaaggctgggctgttgtctccatatcagatcctccacgagtgccttaaaagaaaccatgggatgggtgacacgtctatcaagtttgaagtggttcctgggaaaaaccagaagagtgaatacgtcatggcgtgtggcaagcacacagtgcgcgggtggtgtaagaacaagagagttggaaagcagttagcctcacagaagatccttcagctgctgcacccacatgtcaagaactgggggtctttactgcgcatgtatggccgtgagagcagcaagatggtcaagcaggagacatcggacaagagtgtgattgagctgcagcagtatgccaagaagaacaagcccaacctgcacatcctcagcaagctccaagaggagatgaagaggctagctgaggaaagggaggagactcgaaagaagcccaagatgtccattgtggcgtccgcccagcctggcggtgagcccctgtgcaccgtggacgtgtgagggaggtggcacgggccagggcgcgggggccgccagccgcacttctgaggagaccagcagtcatgcatcgtgcaccacagtgtcaggcctccaacccacgctccttccctgtggccaacctgtgggcccggccttagggtggaggctttagtgtacagggacagccatggccacacagcacacatgtggagcagcggctctccctggaaagctccaggcctgaatggatggactcagcgactgcaccagtggcagctggtgactgtggacagtggtggaccctgcttctgtgcacctgctgcaggctctttttatgaaggctttcatgaattttagtatgtaatacgcactgacgacacatgatgcttggatgacagatgagaggggatggctgagtcctgtggctggcccgtgatgccaggtggcccatgtgcccagggcgcctgcagggctgctacagggacctggtcaggaggtgcacatggtgccctgccctcacccaccctctgtgtttccccttctttgaaaaggtagaagagaaaggaatattttaaacctttttggcttaaacagaattttagcatcagaactagctttctgggattggaggcaaaccatcaaggtggtccctctccagtctggacacgatgccagcaaggatgacgtcctgccacctcctggagttaccctggcctcctagggtccctttttctgatgaagtcttaattccctaaaagcgcctctttggacactgaggccctctctgcctttcctggcctccggcaacagttttttacaaagattttttgcagtcgagtccatatgtccacccattgatttttaaagcttttgtgatattttagcattttgaaagactttcacagtgagagtagaaggtagatttggaatcatgcattttagcaagtggacttgttgaaacaggaagcaagggccttcagtgtagcccattcttgatccagagctgttgcctgtgacagcggtttctctggatgtcaaaggcagctgcctggtgcccagcttgcttctcgactggtggcccctatgggtgggtgtgcgatggaaatgtgttcctgccggagtctgaggcaccagggtgtgctcaaaggctggccctggtggtggactggcacctgtgcagagtgccgtgtgcttgtggtgcgccatctgaagcaagagtccagcgttctgccgtgtctgtcccccaccatgccccctacaggcggtactgatggcgcttttttttttttttctgtcaggaaaacaatgttggcctgtgggccgcccacaacatatccttccctcactacctgtgtgaccaaggttggcttctgttgacctttaaaaaagaaaccctcaactcaaattgctataattagacacttgcttctgtcttgcctcctgtctgcagctgtgaatagtcatttgactgtgactgttgcccttagccagccagatgcgcctgtgaaccaaagcttcgtgcacatgtgttcccctaaaggttggggagcctcgctgtgtcttgctgttcccaggcaccaccacagcaggtgctgccatactcttgtggtctctgtgcgccccccccccccccccacccgtctgccaagcatgggtatgaatcgtgcacacagccatgcttcaaggccggggcaggggagcctgtgctgatgccatccagggcactgggctgtgcctggaaggcgagccttgattgtctgaacacataaagcaaactgtccag

SEQ ID NO: 5961 - DNA, 2498 bp, Homo sapiens
gttgccagaagccaggatcatagagacgctcggcctccgccgcacgcgctggcggactaagagtggctggcgaagcgagcggccggcgcgggcccctggcgggcgggcggtacagccccaagcctgagacccggacctgagcatcgcaggttcgagtcccgccccgcctggggcgaagccgggggtggcggcgacctcgcggcgttgcaccggctctgtgagcacctcccctctgagcacttcccttgtgacaggccacttcccttgtgacaggcccaggacgaggtggccaggcggcccccatggcgtccctggtctaggcggagaaccgcctgggcgatgagtgagaacctcgacaacgagggcccgaagcccatggagagctgtggccaggagagcagcagtgccctgagctgccctaccgtctcggtgccccctgcagccccggcagccctggaggaggtggagaaagagggcgctggggcggctacagggccggggcctcagcccgggctctacagctacatcagggatgacttgtttacctctgagatctttaaactggagctgcagaacgtgcctcgccacgccagcttcagcgacgtccggcgcttcctgggccgctttggtctgcagccccacaaaaccaaactctttgggcaaccaccctgcgcctttgtgacattccgcagcgctgcagagagggacaaggccctgcgcgttttgcatggtgccctctggaaaggccgcccactcagtgtgcgcctggcccggcccaaggccgaccccatggccaggaggaggcgacaggagggtgagagtgagccaccagtaacacgagtggccgacgtggtgacccctctatggacagtgccctatgctgagcagcttgagcggaagcagctggagtgcgagcaggtgctgcagaaacttgccaaggaaatcgggagcaccaaccgtgccttgctgccctggctgctcgagcagaggcacaagcacaacaaggcctgctgcccgctggagggggtcaggccatcaccccagcagactgagtatcgtaataagtgtgagtttctggttggcgtcggggtggatggggaggataacaccgtgggctgtcggctcggcaagtacaagggcgggacgtgtgctgtggcagccccgtttgacaccgtgcacatccccgaagccaccaagcaggtggtgaaggccttccaggagttcatccggtccactccatactcggcatacgacccagagacgtacacaggccactggaagcagctgactgtgcgcaccagccgccgccaccaggccatggccattgcctacttccacccccagaagctgagccctgaggagctggcagagctgaagacctccctagcgcagcacttcacagcagggccaggcagggccagtggagtgacctgcctctacttcgtggaggagggacagcgaaagactcctagccaggagggcctgcccctggagcatgtggctggggaccggtgcatccacgaggacctgctagggctgaccttccggatctctccacacgccttcttccaggtgaacacacccgcagccgaggtgctctacacagtcatccaggactgggcccaattggatgcggggagcatggtgctggacgtgtgctgtggcaccggcaccattggcctggccctggcccggaaggtaaagagggtcattggggtcgagctatgcccagaggctgtggaggacgcccgggtgaacgcccaggacaatgagttgagtaatgtggagttccactgcgggagggccgaggacctggtgcccaccctggtgggcagactggcctcccagcacctcgtggccatcctggacccaccccgtgctggcttgcattccaaggtgatcctggccatccggagagctaagaacctcaggcggctgctgtacgtctcatgcaacccccgggcagccatgggcaactttgtggacgccccccttttccccccacagcctctgcagagccccatctaaccgggtgaagggcattcccttccggccggtcaaggctgtggcagtggacctgttcccgcagaccccgcactgtgagatgctcatcctgtttgagagggtggagcaccccaatggcacaggggtcttggggccccacagccctccagctcaacccacaccaggacccccagataacaccctacaagaaactgggaccttcccctcatcctaggcccaggacccattatggggacaggagctgaagggctcccagggccccaggggcggggaaggcatggcttgctggccaggatattcagaggtaggcagccaaagggcacagaaccctgtgccccaccaggattggcctgctgctaggggccaggggccctgaccaggaagacaggtgggttcctgtagcctgttgcccatccccagggcctttgtggactagccaaggctgtgagggccagaataaacaactgctcaac

SEQ ID NO: 5962 - protein, 562 aa, Homo sapiens
MSENLDNEGPKPMESCGQESSSALSCPTVSVPPAAPAALEEVEKEGAGAATGPGPQPGLYSYIRDDLFTSEIFKLELQNVPRHASFSDVRRFLGRFGLQPHKTKLFGQPPCAFVTFRSAAERDKALRVLHGALWKGRPLSVRLARPKADPMARRRRQEGESEPPVTRVADVVTPLWTVPYAEQLERKQLECEQVLQKLAKEIGSTNRALLPWLLEQRHKHNKACCPLEGVRPSPQQTEYRNKCEFLVGVGVDGEDNTVGCRLGKYKGGTCAVAAPFDTVHIPEATKQVVKAFQEFIRSTPYSAYDPETYTGHWKQLTVRTSRRHQAMAIAYFHPQKLSPEELAELKTSLAQHFTAGPGRASGVTCLYFVEEGQRKTPSQEGLPLEHVAGDRCIHEDLLGLTFRISPHAFFQVNTPAAEVLYTVIQDWAQLDAGSMVLDVCCGTGTIGLALARKVKRVIGVELCPEAVEDARVNAQDNELSNVEFHCGRAEDLVPTLVGRLASQHLVAILDPPRAGLHSKVILAIRRAKNLRRLLYVSCNPRAAMGNFVDAPLFPPQPLQSPI

SEQ ID NO: 5963 - DNA, 722 bp, Homo sapiens
cagtggctcacacaggtcacctgcacgccagggcctgccctccccgcccggcactccccactcaccagggccctctgccagccctacacggcacacgctggttaagaaggtgtccggcgtgggtgggaccacctacgagatctcggtgtgaggactgactgccacacatccgccatggtgccacggggaccaggaccccacagcgcaccccccctccccaccaacttctctgccccagggacccgaggccaccccagcctggtgtggacccatcggcgggagagagtgccacgcctccacagcttgccccaagcgctctgcctgcccgtccactcatctgcccatggggaagtcggctcactgggacaagggccactgggctggtctgtgtctgggcctgtcccatggctggggcagtgagggggcccagtcagcctctttggggcaccctctctcagccaggcttggcccactgccatcacccagcaccccagatcaccgccaggccagcccccaatggtccccttacggacaggtcccagagatggacagaggcacccagggcccccaccgtccttctgacacagcctgtgggctcccggaccgagtgtcccccgccaggctactcctaactaacgcgttgcctttcacggaccccgctggaagcttgtagcttggcaaggctgatgcttctgccctggcctgctctgggtggtggtgga

SEQ ID NO: 5964 - DNA, 404 bp, Homo sapiens
tcttctcgaggcctccgttgcctcgtctgtgcccgggcggtggtgcttacccggcggggtcgcagggaggtctcgtggcggcgcgtgttgggtctgcgtttcccctctggggtgcttgggcagcatgagcccagggctgtggacagcctggtgctcacgggtttgtggctccacagacttcccaagaaggacaacccgaggcgaggcttgtggctggccaactgccagcggctggaccccagcggccagggcctgtgggacccggcatccgagtacatctacttctgctccaaacactttgaggaggactgaccgaggggctgcccagcaagactgcagcctcttcctccctcagatcccaccagacccaccaggtgccataataaagcggattctagacggag

SEQ ID NO: 5965 - DNA, 1242 bp, Homo sapiens
cgtgagtgccgctgacagaagtcaagagaatcggctgggacggggttggggcgacaacgggccgggggggacccgacaggccagagccccttggggaggagcggcggctggaggcgcgaggctcctccggatgcccggagagccgcttgcgacttaactcccgcctctttcccagatgccgcgtcactgctccgccgccggctgctgcacacgggacacgcgcgagacgcgcaaccgcggcatctccttccacagacttcccaagaaggacaacccgaggcgaggcttgtggctggccaactgccagcggctggaccccagcggccagggcctgtgggacccggcatccgagtacatctacttctgctccaaacactttgaggaggactgctttgagctggtgggaatcagtggatatcacaggctaaaggagggggcagtccccaccatatttgagtctttctccaagttgcgccggacaaccaagaccaaaggacacagttacccacctggcccccctgaagtcagccggctcagacgatgcaggaagcgctgctccgagggccgagggcccacaactccattttctccacctccacctgctgatgtcacctgctttcctgtggaagaggcctcagcacctgccactttgccggcctccccagctgggaggctggagcctggccttagcagccccttttcagacctactgggccccttgggtgcccaggcagatgaagcaggctgcagcgcccagccttcaccagagcggcagccctcccctctcgaaccacggccagtctccccctcagcgtatatgctgcgcctgcccccacccgccggagcctacatccagaatgaacacagctaccaggtgggcagcgccttactctggaagcggcgagccgaggcagcccttgatgcccttgacaaggcccagcgccagctgcaggcctgcaagcggcgggagcagcggctgcggttgagactgaccaagctgcagcaggagcgggcacgggagaagcgggcacaggcagatgcccgccagactctgaaggagcatgtgcaggactttgccatgcagctgagcagcagcatggcctgaggggctgctggactgaccgaggggctgcccagcaagactgcagcctcttcctccctcagatcccaccagacccaccaggtgccataataaagcggattctagacggagaaaaaaaaaaaaaaaaaaaaaaaaaaaaa

SEQ ID NO: 5966 - protein, 309 aa, Homo sapiens
MPRHCSAAGCCTRDTRETRNRGISFHRLPKKDNPRRGLWLANCQRLDPSGQGLWDPASEYIYFCSKHFEEDCFELVGISGYHRLKEGAVPTIFESFSKLRRTTKTKGHSYPPGPPEVSRLRRCRKRCSEGRGPTTPFSPPPPADVTCFPVEEASAPATLPASPAGRLEPGLSSPFSDLLGPLGAQADEAGCSAQPSPERQPSPLEPRPVSPSAYMLRLPPPAGAYIQNEHSYQVGSALLWKRRAEAALDALDKAQRQLQACKRREQRLRLRLTKLQQERAREKRAQADARQTLKEHVQDFAMQLSSSMA

SEQ ID NO: 5967 - DNA, 2212 bp, Homo sapiens
cgggaagatggcgggccgggcgacttgagatccgcgggtctccctgctccttttccgtctgcgtcgggagctcccgggcacgtgaggccgtgccgcgtttactggcgggagggacggcctagccgggcgacgcctcggaggaggccgcggaccccttaggtgctgggcccttggaaatcggcgcgtggggggcggtgctcgagctgagcgcgagagggcgggagagctcgtggggtgcgaggggagcaggacgcccggccgggcagcatgagtcagcagcggccggcgaggagattacccagtctcctcctgcacccgacggaggagaccccatcaacgtggagggcctgctgccatcaaaaataaggattaatttagaagataatgtacaatatgtgtccatgagaaatctgctcccgggggtattcttgacttaaacaaggttgcaacgaaactgggagtccgaaagcggagagtgtatgacatcaccgatgtcttagatggaatcgacctcgttgaaaagaaatccaagaaccatattagatggataggatctgatcttagcaattttggagcagttccccaacaaaagaagctacaggaggaacttgctgacttaccagcaatggaagatgctttggatgagttaattaaggattgtgctcagcagctgtttgagttaacagatgacaaagaaaatgaaagactagcatatgtgacctatcaagacattcatagcattcaggccttccatgaacagatcgtcattgcagttaaagctccagcagaaaccagattggatgttccagctcccagagaagactctatcacagtgcacataaggagcaccaacggacctatcgatgtctatttgtgagaagtggagcagggtcagaccagtaacaaaaggtctgaaggtgtcaggacctcttcatctgagagcactcatccagaaggccctgaggaagaagaaaatcctcagcaaagtgaagaattgcttgaagtaagcaactgatggcatttgagaatttatgtatcactgagttttttgggaatatcttcctggagaattacgcatcaaatttgattctcagagcaataaattatccatgaagtgctctcgttctcagtagcggcatcatggccagtagtgtctttgaggagttcaccacttagattactgagtaattgtggtttccacatttgaaaacaactccttttataattattcactgctttttgtcagtgaaatagacatcttgcctcctgaagtagcttcatcacagagtgtcatgaagacagacagtcaggctgaaaaggacagttctttgtggactctacccttcccttcaaggagtatgtcatatgtcacaaaagaaattgccttacactggttcatgtttgcagttactgttgtacattgcatagatgtacacacgaatttaaatgtgatgtctttgtatatatctgtataatgttgagattacttacgaaatatgtctgagtgacacttttcactctcgtacagccaaaataatgtatatatggaaagtgacagacaaattctctaatctctttggtatctataacttattagaatcctctggatgagggttagaagagactttttccaaacttctacatgtagaagtatcataaatgtgctacacatttatgtttgtggatttaattaaagtattttaatatggttttcagtgctaaaattggagtcagatacttcttggttttaagctgtctacctaattgctgtctcccagcagatcggtggcatgcccagtggctttgggggcaaggatagaaatgtcatcaggaaatagctgaattcattgtgaaacatgaattcagtcatggtgataattggaaactcctttcaggtttttgcaagtagattttgtaatgtttgtgtatgcagccttgctgttgagtcagtccaaggggttttacttaggacaagttgtaccttgccctctctccagctctgctcccacattttcacatacctagctatttctacctcattgggtaagtcatttaccactctgtgcctcagtttactctgtagtttaccattagactgtgagctccttgagggactttgtcataatcactgttacatcccagtgcctcacaccatgcctggcccttaagaagtgctcaataaatgtctgaacaaaaaaaaaaacaaaaaaaa

SEQ ID NO: 5968 - DNA, 2211 bp, Homo sapiens
cgggaagatggcgggccgggcgacttgagatccgcgggtctccctgctccttttccgtctgcgtcgggagctcccgggcacgtgaggccgtgccgcgtttactggcgggagggacggcctagccgggcgacgcctcggaggaggccgcggaccccttaggtgctgggcccttggaaatcggcgcgtggggggcggtgctcgagctgagcgcgagagggcgggagagctcgtggggtgcgaggggagcaggacgcccggccgggcagcatgagtcagcagcggccggcgaggagattacccagtctcctcctgcacccgacggaggagaccccatcaacgtggagggcctgctgccatcaaaaataaggattaatttagaagataatgtacaatatgtgtccatgagaaatctgctcccgggggtattcttgacttaaacaaggttgcaacgaaactgggagtccgaaagcggagagtgtatgacatcaccgatgtcttagatggaatcgacctcgttgaaaagaaatccaagaaccatattagatggataggatctgatcttagcaattttggagcagttccccaacaaaagaagctacaggaggaactttctgacttaccagcaatggaagatgctttggatgagttaattaaggattgtgctcagcagctgtttgagttaacagatgacaaagaaaatgaaagactagcatatgtgacctatcaagacattcatagcattcaggccttccatgaacagatcgtcattgcagttaaagctccagcagaaaccagattggatgttccagctcccagagaagactctatcacagtgcacataaggagcaccaacggacctatcgatgtctatttgtgagaagtggagcagggtcagaccagtaacaaaaggtctgaaggtgtcaggacctcttcatctgagagcactcatccagaaggccctgaggaagaagaaaatcctcagcaaagtgaagaattgcttgaagtaagcaactgatggcatttgagaatttatgtatcactgagttttttgggaatatcttcctggagaattacgcatcaaatttgattctcagagcaataaattatccatgaagtgctctcgttctcagtagcggcatcatggccagtagtgtctttgaggagttcaccacttagattactgagtaattgtggtttccacatttgaaaacaactccttttataattattcactgctttttgtcagtgaaatagacatcttgcctcctgaagtagcttcatcacagagtgtcatgaagacagacagtcaggctgaaaaggacagttctttgtggactctacccttcccttcaaggagtatgtcatatgtcacaaaagaaattgccttacactggttcatgtttgcagttactgttgtacattgcatagatgtacacacgaatttaaatgtgatgtctttgtatatatctgtataatgttgagattacttacgaaatatgtctgagtgacacttttcactctcgtacagccaaaataatgtatatatggaaagtgacagacaaattctctaatctctttggtatctataacttattagaatcctctggatgagggttagaagagactttttccaaacttctacatgtagaagtatcataaatgtgctacacatttatgtttgtggatttaattaaagtattttaatatggttttcagtgctaaaattggagtcagatacttcttggttttaagctgtctacctaattgctgtctcccagcagatcggtggcatgcccagtggctttgggggcaaggatagaaatgtcatcaggaaatagctgaattcattgtgaaacatgaattcagtcatggtgataattggaaactcctttcaggtttttgcaagtagattttgtaatgtttgtgtatgcagccttgctgttgagtcagtccaaggggttttacttaggacaagttgtaccttgccctctctccagctctgctcccacattttcacatacctagctatttctacctcattgggtaagtcatttaccactctgtgcctcagtttactctgtagtttaccattagactgtgagctccctgagggactttgtcataatcactgttacatcccagtgcctcacaccatgcctggcccttaagaagtgctcaataaatgtctgaacaaaaaaaaaaaaaaaaaaa

SEQ ID NO: 5969 - DNA, 6385 bp, Homo sapiens
caagaacgtcctagccgccagcagcatctatttcaagtccctggtcctgcacgacaacctcatcaacctggacacagacatggtcagctccacagtgttccagcagatcttggacttcatctacacaggcaagctgctgcccagcgaccagccagccgagcccaacttcagcaccctcctcactgccgccagctacctccagctgcccgagttggcagccctctgccgccgcaaactcaagcgagccggcaagccctttggctctgggagggcggggtccactggcatggggcggcccccccgcagccagcggctgtccacggcctctgtcatccaagctcggtatcaggggctcgtggatgggcgcaagggggcccacgccccccaggagctcccccaagccaaaggctcagacgatgaactctttcttggtggctctaaccaggatagcgtgcaaggtctgggccgggctgtctgcccagctggcggggaggcgggtctggggggctgcagcagcagcaccaacgggagcagcgggggctgcgagcaggagctgggcttggacctgtccaagaaaagcccacccttgccccctgccaccccaggtccccacctcactcccgatgacgcagcccagctgagcgacagccaacatggctcgccccctgcggcctctgctcctcccgttgccaacagtgcctcttattctgagctggggggcacccctgatgagcccatggatctggagggggccgaggacaaccacctgagcctgctggaggcgcctggtgggcagcctcggaagagcctccggcactccactcggaagaaggagtggggcaagaaggagcctgtggctggctccccctttgagcggagagaagcagggcccaagggtccctgcccgggagaggagggtgagggggtcggggacagggttcccaatggcatcctggctagtggggctggccctagcgggccctatggggagcccccctacccctgcaaggaggaggaggagaacggcaaggatgcaagtgaagacagtgcgcagagcgggagcgaggggggcagcggccatgccagcgcccactacatgtaccggcaggagggctacgagacggtgtcctacggggacaacttgtatgtgtgcattccctgcgccaagggcttccccagctctgagcagctcaatgcgcacgtggagactcacacggaggaagagctgttcatcaaggaagagggggcctacgagacaggcagtgggggtgccgaggaggaggccgaggacctgtcagcacccagtgcggcctacacggctgagccccggcccttcaagtgttcggtctgcgagaagacctacaaggacccagccacgctgcggcagcacgagaagacgcactggctgacacggcccttcccctgcaacatctgtggcaaaatgttcacgcagcgcggcaccatgacgcgtcacatgcggagccacctgggcctgaagcccttcgcctgcgatgagtgtggcatgcgcttcacccgtcagtaccgcctcacggagcacatgcgtgtgcactcgggcgagaaaccttacgagtgccagctgtgcgggggcaagttcacccagcagcgcaacctcatcagccacctgcgcatgcacacctccccctcctagaagccaaagacccgcgggcgccctctgccaccttgctccccgggaacccatggaaggagaagcgaggtgatgcagcagcaggggcaagaccctgggtccagtggaggctccgggtggcccctctggcccccactgcccacacccagagctttaatggacagtccgtaccaagcagagccgagaggagggaagccaggggtcccagcccgtctacctccccatcccacccaggcccccagctccccgcgggggccaccgcagggcctgtgggctgggtcacgtgggtctcgctgggacctggtccctttgttgcaggcggcttggagaaagggcagtgggacgctggccacggccagggtggtgtcgggagcaggcctcaccccgctggccgtgtctgtgtgtgtgcacgtgtgcttgtgtctgtgcgggcgcgtgcagccctggttctgcagggaacaggtgctgggggtgcagatccctccctccttgagccagggtggcactgttcactggcgctgggacagtcagggtgaccccaccgcctacctctctacatctaaagagccctctgggcctgtgttgctgttattcctactgatctgttcctctgtttttctttttgatttttgttttttaaaccaaaacagacaatagcttattttctttccgccccctccggggctgagcctgggtctgaagactgaatgtaacaggggccgctggcactcctgcgcgtcccccggctctggcgctgcaggggtgtcggcgcgccacctctccaggccccagaagcccttcttgcccaaaggcttccctggtccctgagccctgcctcggctgcctcaggggagagtgcttttcctgtagtttccaaggaatattctttgtttagaggtacttgttttttattaagagaaaaaccagtgtaacgtttatgtgactgtttgaactggaaggtctggggttccggggggtggggggaggctagactcaatgccggggccgtcggtactcttgttttcatttgtgtgtgcgtgcgtgtgtgtgtgtgtatgtgcgtatgtgtgtgtctatgtgtggtgtgtgccgtatgcatgggcagatgtttcgctttccctccttcctcgctgaacaaggtggagacttctgaccttttgctacctcttgaattcatgacaacgatatgttggtgactggcagtggaagcccttgacactcttgttttccttcgcttagcacctaggaagtcgtgtgcaggagccagcagggcgccaagtggcccagtgcctgcagctcacctgtgggttttccctttgagcctttggccacatccacctcgaggggaccctggcaccccgggcacacaaacctctgtggtataggtgaggggtgtgaggccccagcctggagccaggcactgggtgctgacaggggaaccatgaggagggtggcaggtctttgcagctcccggccagggtgaggcggaagtgagccctcatcctgccactcctatcctccattcctgcaagagttttaagcttgagagagctgaccacagggccccccggggaacagggatggcacttccctgagcagtcctggcccccggccactgtctcggggcccacctctcgcccctcatcttggtaattagccagcctcagatacttctgtgggccctgaagtgggctctcaaggtcagaccaaggttgctgatctcagtcccactgtcttcagccagctgaagctgtggggctgggctggcagcctttattgtcatcttgcttcaccatttttttttctctctcttttcattctattttaagtttagaccaaaaaaatacagagtcatcccctacccccacccctctagagaccctccagctaaaaacagagcctgagttcagggacccaagtggtgagcggcgtcttttgggggtgagggagcttgggtagatgaggctcctggctgagccctccctgtggtgatcccagcctaagatggcccctcttccctcctggtgggagacagaggactggaccctgggtctcaggttccagcaagtcaggctagggacctggggggaggagacccatggacttcacccatactcagtgagggggctcctgccgtcctgacgccaccccgccccatcagcacttaagccacatgacacaaagtctgtaccgcacgggaaatgttcacgcgcctggccgtgtgcatggcctcccgggctgtgggcagccgcatctgtgaggtgactcgtgaaagtaggtgattcctttgcagaacttcagggactgggagcagaggcccctcactcaacgacgtttgtgcgacatagtattgtatccaccttagtattgtatcgagccttttctgtgttttaatgagaaagcagaacactagtttcctatttaagactttaagggtttgtggggcggggcgggattaacacaacatttggctttgttttctttttcctttgatttccacatcaggtgtgtgcgagtgtgtgtgtgtggagatgttaagagcctcacaaggaaactgggttattggaggccaaggcggcttacagttctctgcgttcgtcacttaattcctgaatgtttcagagaaacaggaatcagaaaatagcagatatcatgtaggaaagagaggataaacaaagaaaaaagaaaaaaaaataagctcatacccaaattcacaaagcctattttttaaaccaaagcacattttgaatgagtatggaacctccatgggctcagaaaaaagatgctaatatatttatctcattgtttacataagcttttacagtttcagacctcagcagctgtaaggccagtccagggaaccctcccctgctgctggaaacccttctgagttggccctggagtggctcacgggcagagaagggtagccctggggctgggggagggattggaagcctccctggagtcacctgagccctcgtccccattcccagggcccctccaagcccagctggcaccaaagagcttgggcccgtgctgaccagcccccaaggccctctggccggaccatgctggtcctgaccagctagcctacgcggggatggccgtcagttctggccacaggacccgagtctgggcttgggtccccctgctgctctgcccgtgacccttggggatgggttgatgcgagggtcccactcaagccaaaaagccgggacctttgcgcagctctgtcgactctggtgggtccccactcctggggccccctaaccccaccccaggcagcggaaggggctgactgggtctggtccttaccaacatagacggtgcaaacactcttaacagtgttgtttttgtatcaatatgtttgtgcagtgatgaatgtatttatttctcagacttggggcgagtgagcgggtggcaggccgggctccgccactgcatgctcccgccggaccgagccccagcaagggctcctccaggattgcaaaaaaaaaaggaagagaaaagatgaacctttaagcaaataagaatctcagagactcgcagcatagccatacacctcagcctgtgaaatgaacgatccggaccctcaccaactttccccacctcaggcagccctgtgtgtttaccgttcatcaccactcgggggcaccgggccgcccacccactcccaaaatccgtcagtattcactggacctcaggccctgtgcaggagtgcgatccgggctgggccgctgggcaggctgaccccctgccctcctgcggccatcctgagttggggtgaggcctgggcagccggagggcagggctcagggagcaggaggctgcatccgtccacccccaggcgtgggggacaaaagccaaaggtgccaggccttagagcagacaagggctctcagccctggcatgccccctaaagggaccaaggtcctcctatttcccagaaccccgttggggcagatgttactgaacctgtgaatcagacgccaggagtgagggctggggagggacctaactggagcctcagtctgacattccacgccggggtgggggtgggcatgagcggtgggaactgaggctgcccaggacccccttcctaggatgccccggcttcagtcaccccactttaactttctaccaggaccccctccccctacctcaccttgctatttattgctgtaatttattgacctcaaaaatgctgcataacagacctcactggggcagggaggatccccagggctcccaccctccacttggcgggccccgtggggccaggtgctgaggggagcctctctaccccacccatcactagcttccctctgccctctcccaccccgggggggacccaggttgggcactggctcatttctcgcaaatacctcgaaggggaggggggagggatggggttatagctgttttgtttaattggaactggaagagggatcatgttttgttttatgcccttcccagaaggggggagggacaccgggatcgcactcctgtactggccaccgccgctgtcacttgtcacattgagttcatgtcccttgagagtttgtataaattcaggtcagagctgcagctacacagctgcccagtgtcatagaaaagcaattcaccaacgactgatctctccattcagaagtgtgcagtcttaaatgtacagcgataagaaactgttattttatgatcttttcattaaaagcttgattg

SEQ ID NO: 5970 - protein, 615 aa, Homo sapiens
MVSGPLALRWCAWAGRGDMGPDMELPSHSKQLLLQLNQQRTKGFLCDVIIMVENSIFRAHKNVLAASSIYFKSLVLHDNLINLDTDMVSSTVFQQILDFIYTGKLLPSDQPAEPNFSTLLTAASYLQLPELAALCRRKLKRAGKPFGSGRAGSTGMGRPPRSQRLSTASVIQARYQGLVDGRKGAHAPQELPQAKGSDDELFLGGSNQDSVQGLGRAVCPAGGEAGLGGCSSSTNGSSGGCEQELGLDLSKKSPPLPPATPGPHLTPDDAAQLSDSQHGSPPAASAPPVANSASYSELGGTPDEPMDLEGAEDNHLSLLEAPGGQPRKSLRHSTRKKEWGKKEPVAGSPFERREAGPKGPCPGEEGEGVGDRVPNGILASGAGPSGPYGEPPYPCKEEEENGKDASEDSAQSGSEGGSGHASAHYMYRQEGYETVSYGDNLYVCIPCAKGFPSSEQLNAHVETHTEEELFIKEEGAYETGSGGAEEEAEDLSAPSAAYTAEPRPFKCSVCEKTYKDPATLRQHEKTHWLTRPFPCNICGKMFTQRGTMTRHMRSHLGLKPFACDECGMRFTRQYRLTEHMRVHSGEKPYECQLCGGKFTQQRNLISHLRMHTSPS

SEQ ID NO: 5971 - DNA, 1365 bp, Homo sapiens
gggctgtccggcccactcccctgggagcgcgagcggtggacccaggcggccatgtcccgccctcgcatgcgcctggtggtcaccgcggacgactttggttactgcccgcgacgcgatgagggtatcgtggaggcctttctggccggggctgtgaccagcgtgtccctgctggtcaacggtgcggccacggagagcgcggcggagctggcccgcaggcacagcatccccacgggcctccacgccaacctgtccgagggccgccccgtgggtccggcccgccgtggcgcctcatcgctgctcggcccggaaggcttcttccttggcaagatgggattccgggaggcggtggcggccggagacgtggatttgcctcaggtgcggagccgcagctacaggaggatgctcgcgaggacccccagagctccgcccggagggtactgtgaggccgttaggagctggcggtggatgacttccgcattcaaacactggagccatcacacggaagcacgaggagggtatcctcggcagctactcccggtcgctcaaggtgtctctcgctcgccctctaggtgcgggaggagctcgaggcccaactaagctgcttccgggagctgctgggcagggcccccacgcacgcggacgggcaccagcacgtgcacgtgctcccaggtggacagacgccttcgtgggcctgagcacttgcggccggcacatgtccgctcaccgcgtgtccggggccctggcgcgggtcctggaaggtaccctagcgggccacaccctgacagccgagctgatggcgcaccccggctaccccagtgtgcctcccaccggcggctgcggtgaaggccccgacgctttctcttgctcttgggagcggctgcatgagctgcgcgtcctcaccgcgcccacgctgcgggcccagcttgcccaggatggcgtgcagctttgcgccctcgacgacctggactccaagaggccaggggaggaggtcccctgtgagcccactctggaacccttcctggaaccctccctactctgaccccctacagacaaccaagcactaatccccttagtaccaagaaaggggagccaggatttagtcctggcccagcccagagctgggacctggagcacgatctgttgacttccctgggtaggacactgccacctctgggctcaggtcctcatgcctccaaatggcatctagagtttgagcagccttcttggctgcaggcaggcctagcctgtggcagcgggctagggcccgcagagcatttggtgcccctccatgttgcaatgcaaacaccttcaccactggggcagtggggagagatggctatattaataaaataacgtgtgtctttc

SEQ ID NO: 5972 - protein, 323 aa, Homo sapiens
MSRPRMRLVVTADDFGYCPRRDEGIVEAFLAGAVTSVSLLVNGAATESAAELARRHSIPTGLHANLSEGRPVGPARRGASSLLGPEGFFLGKMGFREAVAAGDVDLPQVREELEAQLSCFRELLGRAPTHADGHQHVHVLPGVCQVFAEALQAYGVRFTRLPLERGVGGCTWLEAPARAFACAVERDARAAVGPFSRHGLRWTDAFVGLSTCGRHMSAHRVSGALARVLEGTLAGHTLTAELMAHPGYPSVPPTGGCGEGPDAFSCSWERLHELRVLTAPTLRAQLAQDGVQLCALDDLDSKRPGEEVPCEPTLEPFLEPSLL

SEQ ID NO: 5973 - DNA, 810 bp, Homo sapiens
gctggagccgggccggggcgatgtggagcgcgggccgcggcggggctgcctggccggtgctgttggggctgctgctggcgctgttagtgccgggcggtggtgccgccaagaccggtgcggagctcgtgacctgcgggtcggtgctgaagctgctcaatacgcaccaccgcgtgcggctgcactcgcacgacatcaaatacggatccggcagcggccagcaatcggtgaccggcgtagaggcgtcggacgacgcgaatagctactggcggatccgcggcggctcggagggcgggtgcccgtgcgggtccccggtgcgctgcgggcaggcggtgaggctcacgcatgtgcttacgggcaagaacctgcacacgcaccacttcccgtcgccgctgtccaacaaccaggaggtgagtgcctttggggaagacggcgagggcgacgacctggacctatggacagtgcgctgctctggacagcactgggagcgtgaggctgctgtgcgcttacagcatgtgggcacctctgtgttcctgtcagtcacgggtgagcagtatggaagccccatccgtgggcagcatgaggtccacggcatgcccagtgccaacacgcacaatacgtggaaggccatggaaggcatcttcatcaagcctagtgtggagccctctgcaggtcacgatgaactctgagtgtgtggatggatgggtggatggagggtggcaggtggggcgtctgcagggccactcttggcagagactttgggtttgtaggggtcctcaagtgcctttgtgattaaagaatgttggtctatga

SEQ ID NO: 5974 - protein, 221 aa, Homo sapiens
MWSAGRGGAAWPVLLGLLLALLVPGGGAAKTGAELVTCGSVLKLLNTHHRVRLHSHDIKYGSGSGQQSVTGVEASDDANSYWRIRGGSEGGCPCGSPVRCGQAVRLTHVLTGKNLHTHHFPSPLSNNQEVSAFGEDGEGDDLDLWTVRCSGQHWEREAAVRLQHVGTSVFLSVTGEQYGSPIRGQHEVHGMPSANTHNTWKAMEGIFIKPSVEPSAGHDEL

SEQ ID NO: 5975 - DNA, 2148 bp, Homo sapiens
gcttcagggtacagctcccccgcagccagaagccgggcctgcagcgcctcagcaccgctccgggacaccccacccgcttcccaggcgtgacctgtcaacagcaacttcgcggtgtggtgaactctctgaggaaaaaccattttgattattactctcagacgtgcgtggcaacaagtgactgagacctagaaatccaagcgttggaggtcctgaggccagcctaagtcgcttcaaaatggaacgaaggcgtttgtggggttccattcagagccgatacatcagcatgagtgtgtggacaagcccacggagacttgtggagctggcagggcagagcctgctgaaggatgaggccctggccattgccgccctggagttgctgcccagggagctcttcccgccactcttcatggcagcctttgacgggagacacagccagaccctgaaggcaatggtgcaggcctggcccttcacctgcctccctctgggagtgctgatgaagggacaacatcttcacctggagaccttcaaagctgtgcttgatggacttgatgtgctccttgcccaggaggttcgccccaggaggtggaaacttcaagtgctggatttacggaagaactctcatcaggacttctggactgtatggtctggaaacagggccagtctgtactcatttccagagccagaagcagctcagcccatgacaaagaagcgaaaagtagatggtttgagcacagaggcagagcagcccttcattccagtagaggtgctcgtagacctgttcctcaaggaaggtgcctgtgatgaattgttctcctacctcattgagaaagtgaagcgaaagaaaaatgtactacgcctgtgctgtaagaagctgaagatttttgcaatgcccatgcaggatatcaagatgatcctgaaaatggtgcagctggactctattgaagatttggaagtgacttgtacctggaagctacccaccttggcgaaattttctccttacctgggccagatgattaatctgcgtagactcctcctctcccacatccatgcatcttcctacatttccccggagaaggaagagcagtatatcgcccagttcacctctcagttcctcagtctgcagtgcctgcaggctctctatgtggactctttatttttccttagaggccgcctggatcagttgctcaggcacgtgatgaaccccttggaaaccctctcaataactaactgccggctttcggaaggggatgtgatgcatctgtcccagagtcccagcgtcagtcagctaagtgtcctgagtctaagtggggtcatgctgaccgatgtaagtcccgagcccctccaagctctgctggagagagcctctgccaccctccaggacctggtctttgatgagtgtgggatcacggatgatcagctccttgccctcctgccttccctgagccactgctcccagcttacaaccttaagcttctacgggaattccatctccatatctgccttgcagagtctcctgcagcacctcatcgggctgagcaatctgacccacgtgctgtatcctgtccccctggagagttatgaggacatccatggtaccctccacctggagaggcttgcctatctgcatgccaggctcagggagttgctgtgtgagttggggcggcccagcatggtctggcttagtgccaacccctgtcctcactgtggggacagaaccttctatgacccggagcccatcctgtgcccctgtttcatgcctaactagctgggtgcacatatcaaatgcttcattctgcatacttggacactaaagccaggatgtgcatgcatcttgaagcaacaaagcagccacagtttcagacaaatgttcagtgtgagtgaggaaaacatgttcagtgaggaaaaaacattcagacaaatgttcagtgaggaaaaaaaggggaagttggggataggcagatgttgacttgaggagttaatgtgatctttggggagatacatcttatagagttagaaatagaatctgaatttctaaagggagattctggcttgggaagtacatgtaggagttaatccctgtgtagactgttgtaaagaaactgttgaaaataaagagaagcaatgtgaagcaaaaaaaaaaaaaaaaaa

SEQ ID NO: 5976 - protein, 509 aa, Homo sapiens
MERRRLWGSIQSRYISMSVWTSPRRLVELAGQSLLKDEALAIAALELLPRELFPPLFMAAFDGRHSQTLKAMVQAWPFTCLPLGVLMKGQHLHLETFKAVLDGLDVLLAQEVRPRRWKLQVLDLRKNSHQDFWTVWSGNRASLYSFPEPEAAQPMTKKRKVDGLSTEAEQPFIPVEVLVDLFLKEGACDELFSYLIEKVKRKKNVLRLCCKKLKIFAMPMQDIKMILKMVQLDSIEDLEVTCTWKLPTLAKFSPYLGQMINLRRLLLSHIHASSYISPEKEEQYIAQFTSQFLSLQCLQALYVDSLFFLRGRLDQLLRHVMNPLETLSITNCRLSEGDVMHLSQSPSVSQLSVLSLSGVMLTDVSPEPLQALLERASATLQDLVFDECGITDDQLLALLPSLSHCSQLTTLSFYGNSISISALQSLLQHLIGLSNLTHVLYPVPLESYEDIHGTLHLERLAYLHARLRELLCELGRPSMVWLSANPCPHCGDRTFYDPEPILCPCFMPN

SEQ ID NO: 5977 - DNA, 1726 bp, Homo sapiens
aacgccagcgcctgcgcactgagggcggcctggtcgtcgtctgcggcggcggcggcggctgaggagcccggctgaggcgccagtacccggcccggtccgcatttcgccttccggcttcggtttccctcggcccagcacgccccggccccgccccagccctcctgatccctcgcagcccggctccggccgcccgcctctgccgccgcaatgatgatgatggcgctgagcaagaccttcgggcagaagcccgtgaagttccagctggaggacgacggcgagttctacatgatcggctccgaggtgggaaactacctccgtatgttccgaggttctctgtacaagagatacccctcactctggaggcgactagccactgtggaagagaggaagaaaatagttgcatcgtcacatgatcacggatacacgactctagccaccagtgtgaccctgttaaaagcctcggaagtggaagagattctggatggcaacgatgagaagtacaaggctgtgtccatcagcacagagccccccacctacctcagggaacagaaggccaagaggaacagccagtgggtacccaccctgcccaacagctcccaccacttagatgccgtgccatgctccacaaccatcaacaggaaccgcatgggccgagacaagaagagaaccttccccctttggtgtggatgcatcgctgcactcaccctccgtgctgattccgccttagttctccactttgatgaccatgacccagctgtgatccatgagaacgcatctcagcccgaggtgctggtccccatccggctggacatggagatcgatgggcagaagctgcgagacgccttcacctggaacatgaatgagaagttgatgacgcctgagatgttttcagaaatcctctgtgacgatctggatttgaacccgctgacgtttgtgccagccatcgcctctgccatcagacagcagatcgagtcctaccccacggacagcatcctggaggaccagtcagaccagcgcgtcatcatcaagctgaacatccatgtgggaaacatttccctggtggaccagtttgagtgggacatgtcagagaaggagaactcaccagagaagtttgccctgaagctgtgctcggagctggggttgggcggggagtttgtcaccaccatcgcatacagcatccggggacagctgagctggcatcagaagacctacgccttcagcgagaaccctctgcccacagtggagattgccatccggaacacgggcgatgcggaccagtggtgcccactgctggagactctgacagacgctgagatggagaagaagatccgcgaccaggacaggaacacgaggcggatgaggcgtcttgccaacacggccccggcctggtaaccagcccatcagcacacggctcccacggagcatctcagaagattgggccgcctctcctccatcttctggcaaggacagaggcgaggggacagcccagcgccatcctgaggatcgggtgggggtggagtgggggcttccaggtggcccttcccggcacacattccatttgttgagccccagtcctgccccccaccccaccctccctacccctccccagtctctggggtcaggaagaaaccttattttaggttgtgttttgtttttgtataggagccccaggcagggctagtaacagtttttaaataaaaggcaacaggtcatgttcaatttcttc

SEQ ID NO: 5978 - protein, 394 aa, Homo sapiens
MMMMALSKTFGQKPVKFQLEDDGEFYMIGSEVGNYLRMFRGSLYKRYPSLWRRLATVEERKKIVASSHDHGYTTLATSVTLLKASEVEEILDGNDEKYKAVSISTEPPTYLREQKAKRNSQWVPTLPNSSHHLDAVPCSTTINRNRMGRDKKRTFPLWCGCIAALTLRADSALVLHFDDHDPAVIHENASQPEVLVPIRLDMEIDGQKLRDAFTWNMNEKLMTPEMFSEILCDDLDLNPLTFVPAIASAIRQQIESYPTDSILEDQSDQRVIIKLNIHVGNISLVDQFEWDMSEKENSPEKFALKLCSELGLGGEFVTTIAYSIRGQLSWHQKTYAFSENPLPTVEIAIRNTGDADQWCPLLETLTDAEMEKKIRDQDRNTRRMRRLANTAPAW

SEQ ID NO: 5979 - DNA, 561 bp, Homo sapiens
accacagtggtgtccgagaagtcaggcacgtagctcagcggcggccgcggcgcgtgcgtctgtgcctctgcgcgggtctcctggtccttctgccatcatgccgatgttcatcgtaaacaccaacgtgccccgcgcctccgtgccggacgggttcctctccgagctcacccagcagctggcgcaggccaccggcaagcccccccagtacatcgcggtgcacgtggtcccggaccagctcatggccttcggcggctccagcgagccgtgcgcgctctgcagcctgcacagcatcggcaagatcggcggcgcgcagaaccgctcctacagcaagctgctgtgcggcctgctggccgagcgcctgcgcatcagcccggacagggtctacatcaactattacgacatgaacgcggccaatgtgggctggaacaactccaccttcgcctaagagccgcagggacccacgctgtctgcgctggctccacccgggaacccgccgcacgctgtgttctaggcccgcccaccccaaccttctggtggggagaaataaacggtttagagact

SEQ ID NO: 5980 - protein, 115 aa, Homo sapiens
MPMFIVNTNVPRASVPDGFLSELTQQLAQATGKPPQYIAVHVVPDQLMAFGGSSEPCALCSLHSIGKIGGAQNRSYSKLLCGLLAERLRISPDRVYINYYDMNAANVGWNNSTFA

SEQ ID NO: 5981 - DNA, 3604 bp, Homo sapiens
ttgggcgagagggtggggccactcaacgctgaggcggcgaatggccggagcagacttaaatcaagaggctggggacctctaagatcaaagtttggggcggggcctaaggagggggcggggcctccagattcgagacctggaagggctggggcggcgcttggggcggcccagccgccgcctcccgttctctcctccgcagcggcggcggtggcggagaaggaactcgacacgcaccgaccgccctcccgccccagccgaagcggaagctgtagcccgctctgggccggggccatgggcgccccgcgccgcccgggtcatgaggacggaggcggaggcagcggggccgccgctcgagcccggggactttgtgcaactgcctgtgcccgtcatccagcagctctaccactgggactgtggcctggcctgctccaggatggtgctgcaggtacctgggccagctggacgacagtgagtttgagagagccctgcagaagctgcagctgaccaggagcatctggaccatcgacctggcctacctgatgcaccactttggcgtgaggcaccgcttctgtacccagaccctgggtgtcgacaagggctacaagaaccagtccttctacaggaagcactttgacacagaagagacccgggtgaatcagctgtttgcacaagcaaaggcctgcaaggtgctggtggagaaatgcacagtgagtgtgaaggacatccaggcgcacctggctcagggccatgtggccatcgtgctggtgaactcgggggtgctgcactgtgacctgtgctccagccctgtcaagtactgctgcttcacccccagtggccaccactgcttctgccgcactcctgactaccagggccacttcatcgtgctgcgtggctacaaccgggccactggctgcatcttctacaacaacccagcctatgccgacccaggaatgtgcagcaccagcatcagtaactttgaggaggccagaaccagctatggcacagatgaggacatcctctttgtctacttggacagctgacagcaggagcctggtgcgcctaggccctcggaccccatccccaccccagccgggcccgctcaggatgccctggcccaggcttggggctgctggggttggaatgtggaactgcagcctcagcccatctggcagagtcccaggaactcggagactggcacagctgctttgtctgccagtgccgtgtgttgtcatgtcactcaccccaagcacctgctggctgctggaagcataccccaagaccccaagccttgactccagctgcgcccacaggaagtccagtcccgacagtgcccttgttgcctttgagccagatccatggcaatggtctccccacagaccgcaggactgagcctggagagagaagttgcttgacggatgccacttgtcaggacagtatgtgagtgtctggagacagcatagctgaccccaatcccccagggctgaggacccctccaggcccctctctcctggaagtgctgcatatgcccctgtgcccagtggttgatgataccaccaccacctgcctacccatgggcccaagtttctgtggctcattacagggcatctgacccctgccacccagcatagacacacctcacagctgccctgccatgcagagccctggccgctggagactcttaaagcccccacagccctccaggtcctccagctctgtcagatggagggctctcgggcctagatcccactggtaggcctcgtggctggcagcagtgctctgggaataaacagctgccctagccccagagggatccctgcacccaggaggcctcctgacaccagccaaaatcctgacagcagggtctgccctcttgagtgtggggagcccctagtcctttaaggttggctgctaaggcctgtgctccaaagcaacgggctggggcagcctgcagctgcccacccaacctggtcttcacaccagattgcacaggatactgggtcttgtctatcttgatggagaagaggggttcctgcccaggatcttacaacacagcaagtagcatagagctctttccttcctcttttttggggaggttggggtcaggggttgtttctttgagatttaagttttcatttttgaggggtaatcaccttcaagtaaaacagtaatagcaagagtgaaggtactttggaaccactaacacctctgcacagggcagttagccagctcaagttctttttcagagaaagggacttggccagtggtttaagtacctgccccttcacctctcagacgaggcagctgacgaggcagctggcccagtcttgggagtctgctcaggacagtggtggagctgggtcttgaaccccagtctgcacctaaaaaactaaaggaaatggatttttttttttttttttgagacggagactcactctgttgcccagactggagtgcagtggcacgatcttggcttactacaacctccgcctcctgggttcaagcgatcctcctgcctcagccccccactagctgggactacaggcacatgccaccatgcccggctaatttttttgtatttttagtagagaccaggcttcgccatgttggccaggctggtctcgaacccctgagctcaggtgatccacctgcctcggcctcccaaagtgggaaatgggtcattttcaaaggggcaacagtgataccatccctgcactcctgggtcctgctcttccaatgcccaaggcatggcatggtggcagctgtgcccccgcccattgctttggagcacagatgactctgggggcagaggtgggctctgtttaggagggcagtgagaccacccagccaaattgcttctcaaccctagacaaagcctttggccaagagggaggtgctgttagttgggcagcccttctgggtttcagagaccggtgttggctctagactggtctcatctccattgccttaatgccaggtggcccaggagtacccatgcacagcagctgtggggtgtgggcatcttcaggtggtgttctggtaaaattgttagaatagctgtatgaaggaaaccagtgggaggaaatgaagttttcaggatggtgggatgtgatttagacagtgcacatgctgttagggctgtcactagggagtggccttcatggagggtggtaacagcacctcagtccagccaaaatgtttagaaacactcagtctctggtcccagaggatggcttctcagggcatgccacaagttaaaggtcaccttcctgaaagatgaatgagaaagctgcccattctcaagactcatctgcctagggagggtcacagaggcaggatgtaagacacactgtgttgcattcttgcacaagtcatgaaaatggagccagagagcctggacatcagggacttttgcccacagcacatgacaccgacagctgcccagcctgttcacatgctggggaccagcacagcacctgaagccatgtgggacagttgggctttgttcattctagccacggggatgaaagggatcttttgcattgcagagattttatatatattttgtttgtaatgagccattctcaataaacattattctcactgc

SEQ ID NO: 5982 - protein, 166 aa, Homo sapiens [sequence omitted]

SEQ ID NO: 5983 - DNA, 626 bp, Homo sapiens
tcttgactcacgccttcgccgtagcatctttcgcagcggaccgaagagaagaaaagtaggccagagccgaactctcttcctgccaagatgtctattggtgtgccgattaaagtactgcatgaggccgagggccacattgtgacatgtgagacgaacaccggtgaggtatatcgggggaagctcattgaagcagaggacaacatgaactgccagatgtccaacatcacagtcacatacagagatggccgagtggcacagctggagcaggtatacatccgtggcagcaaaatccgctttctgattttgcctgacatgctgaagaacgcacccatgttaaagagcatgaaaaataaaaaccaaggctcaggggctggccgaggaaaagctgccattctcaaggcccaagtggccgcaagaggaagaggacgtggaatgggacgtggaaacatctttcaaaagcgaagataattttctaagttgaacagaactttgtccttttttctttcaggttatctgagttcattggagtgggtgcttgtgcatatatctaggtatcttttgccatctttctctttagatcaggggaaatgtttaagctaaataaatctggggggttttttgttctg

SEQ ID NO: 5984 - protein, 126 aa, Homo sapiens
MSIGVPIKVLHEAEGHIVTCETNTGEVYRGKLIEAEDNMNCQMSNITVTYRDGRVAQLEQVYIRGSKIRFLILPDMLKNAPMLKSMKNKNQGSGAGRGKAAILKAQVAARGRGRGMGRGNIFQKRR

SEQ ID NO: 5985 - DNA, 1118 bp, Homo sapiens
cattgcagtacactgagctccacagagacagcgccggggcaagtgagagccggacgggcactgggcgactgtgcctcgctgaggaaaaataactaaacatgagcaaaggagatcctaagaagctgagaggcaaaatgtcatcacatgcattttttgggcaaacttgtcgggaggcgcataagaagaagcacccagatgcttcagtcaacctctcagagttttctaagaagtgcccattacgaaagagaaatgaaaacctatatccctcccaaaggggagacaaaaaagaagttcaaggatccgaatgcacccaagaggactccttcggccttcttcctgttctgctctgcgtatcgcccaaaaatcaaaggagaacatcctggcctgtccattggtgatgttgcgaagaaactgggagagatgtggaataacactgccgcagatgacaagcagccttatgaaaagaaggctgcgaagctgaaggaaaaatacgaaaaggatattgctgcatatcgagctaaaggaaagcctgatgcagcaaaaaagggagttgtcaaggctgaaaaaagcaagaaaaagaaggaagaggaggaagatgaggaagatgaagaggatgaggaggaggaagatgaagaagatgaagatgaagaagatgatgaataagttggttctagcgcagttttttttttcttgtctataaagcatttaacccccctgtacacaactcactccttttaaagaaaaaaattgaaatgtaaggctgtgtaagatttgtttttaaactgtacagtgtctttttttgtatagttaacacactaccgaatgtgtctttagatagccctgtcctgatggtattttcaatagccgctaaccttgcctggtacagtatgggggctgtaaattggcatggaaatttaaagcgggttcttgttggtgcacagcacaaattagttatatatggggatgatagttttttcatcttcagttgtctctgatgcagcttatacgaaataattattctgttaactgaataccactctgtaattgcaaaaagaaaaagttgcagctgttttgttgacattctgaatgcttctaagtaaatacaatttttttattag

SEQ ID NO: 5986 - DNA, 300 bp, Homo sapiens
atgggtgcatacaagtacatcctggagctatggagaaagaagcagtctgatgtcatgcgctttcttctgagggtccgctgctggcagtaccgccagctatctgctctccacagggctccccgccccacccggcctgataaagtgcaccgactgggctacaaacaaggccaagcaagtgacagtgagtcgtgtggacctggtaaaatcaccaacttctctgattctccttatcttgaaaacagggatgataatgctcccccctaccccacagatgctgtgacgttccaagcagacatctaa

SEQ ID NO: 5987 - DNA, 1836 bp, Homo sapiens
ggcgctgggcggctgcggcgcgcggtgcgcggtgcgtagtctggagctatggtggtggtggcagccgcgccgaacccggccgacgggacccctaaagttctgcttctgtcggggcagcccgcctccgccgccggagccccggccggccaggccctgccgctcatggtgccagcccagagaggggccagcccggaggcagcgagcggggggctgccccaggcgcgcaagcgacagcgcctcacgcacctgagccccgaggagaaggcgctgaggaggaaactgaaaaacagagtagcagctcagactgccagagatcgaaagaaggctcgaatgagtgagctggaacagcaagtggtagatttagaagaagagaaccaaaaacttttgctagaaaatcagcttttacgagagaaaactcatggccttgtagttgagaaccaggagttaagacagcgcttggggatggatgccctggttgctgaagaggaggcggaagccaaggggaatgaagtgaggccagtggccgggtctgctgagtccgcagcactcagactacgtgcacctctgcagcaggtgcaggcccagttgtcacccctccagaacatctccccatggattctggcggtattgactcttcagattcagagtctgatatcctgttgggcattctggacaacttggacccagtcatgttcttcaaatgcccttccccagagcctgccagcctggaggagctcccagaggtctacccagaaggacccagttccttaccagcctccctttctctgtcagtggggacgtcatcagccaagctggaagccattaatgaactaattcgttttgaccacatatataccaagcccctagtcttagagataccctctgagacagagagccaagctaatgtggtagtgaaaatcgaggaagcacctctcagcccctcagagaatgatcaccctgaattcattgtctcagtgaaggaagaacctgtagaagatgacctcgttccggagctgggtatctcaaatctgctttcatccagccactgcccaaagccatcttcctgcctactggatgcttacagtgactgtggatacgggggttccctttccccattcagtgacatgtcctctctgcttggtgtaaaccattcttgggaggacacttttgccaatgaactctttccccagctgattagtgtctaaggaatgatccaatactgttgcccttttccttgactattacactgcctggaggatagcagagaagcctgtctgtacttcattcaaaaagccaaaatagagagtatacagtcctagagaattcctctatttgttcagatctcatagatgacccccaggtattgtcttttgacatccagcagtccaaggtattgagacatattactggaagtaagaaatattactataattgagaactacagcttttaagattgtacttttatcttaaaagggtggtagttttccctaaaatacttattatgtaagggtcattagacaaatgtcttgaagtagacatggaatttatgaatggttctttatcatttctcttccccctttttggcatcctggcttgcctccagttttaggtcctttagtttgcttctgtaagcaacgggaacacctgctgagggggctctttccctcatgtatacttcaagtaagatcaagaatcttttgtgaaattatagaaatttactatgtaaatgcttgatggaattttttcctgctagtgtagcttctgaaaggtgctttctccatttatttaaaactacccatgcaattaaaaggtacaatgcaaaaaaaaaaaaaaaaa

SEQ ID NO: 5988 - protein, 261 aa, Homo sapiens
MVVVAAAPNPADGTPKVLLLSGQPASAAGAPAGQALPLMVPAQRGASPEAASGGLPQARKRQRLTHLSPEEKALRRKLKNRVAAQTARDRKKARMSELEQQVVDLEEENQKLLLENQLLREKTHGLVVENQELRQRLGMDALVAEEEAEAKGNEVRPVAGSAESAALRLRAPLQQVQAQLSPLQNISPWILAVLTLQIQSLISCWAFWTTWTQSCSSNALPQSLPAWRSSQRSTQKDPVPYQPPFLCQWGRHQPSWKPLMN

SEQ ID NO: 5989 - DNA, 2390 bp, Homo sapiens
agagggagacggacgttgagagaacgaggaggaaggagagaaaatggcgtccacggattacagtacctatagccaagctgcagcgcagcagggctacagtgcttacaccgcccagcccactcaaggatatgcacagaccacccaggcatatgggcaacaaagctatggaacctatggacagcccactgatgtcagctatacccaggctcagaccactgcaacctatgggcagaccgcctatgcaacttcttatggacagcctcccactggttatactactccaactgccccccaggcatacagccagcctgtccaggggtatggcactggtgcttatgataccaccactgctacagtcaccaccacccaggcctcctatgcagctcagtctgcatatggcactcagcctgcttatccagcctatgggcagcagccagcagccactgcacctacaagaccgcaggatggaaacaagcccactgagactagtcaacctcaatctagcacagggggttacaaccagcccagcctaggatatggacagagtaactacagttatccccaggtacctgggagctaccccatgcagccagtcactgcacctccatcctaccctcctaccagctattcctctacacagccgactagttatgatcagagcagttactctcagcagaacacctatgggcaaccgagcagctatggacagcagagtagctatggtcaacaaagcagctatgggcagcagcctcccactagttacccaccccaaactggatcctacagccaagctccaagtcaatatagccaacagagcagcagctacgggcagcagagttcattccgacaggaccaccccagtagcatgggtgtttatgggcaggagtctggaggattttccggaccaggagagaaccggagcatgagtggccctgataaccggggcaggggaagagggggatttgatcgtggaggcatgagcagaggtgggcggggaggaggacgcggtggaatgggcagcgctggagagcgaggtggcttcaataagcctggtggacccatggatgaaggaccagatcttgatctaggccctcctgtagatccagatgaagactctgacaacagtgcaatttatgtacaaggattaaatgacagtgtgactctagatgatctggcagacttctttaagcagtgtggggttgttaagatgaacaagagaactgggcaacccatgatccacatctacctggacaaggaaacaggaaagcccaaaggcgatgccacagtgtcctatgaagacccacccactgccaaggctgccgtggaatggtttgatgggaaagattttcaagggagcaaacttaaagtctcccttgctcggaagaagcctccaatgaacagtatgcggggtggtctgccaccccgtgagggcagaggcatgccaccaccactccgtggaggtccaggaggcccaggaggtcctgggggacccatgggtcgcatgggaggccgtggaggagatagaggaggcttccctccaagaggaccccggggttcccgagggaacccctctggaggaggaaacgtccagcaccgagctggagactggcagtgtcccaatccgggttgtggaaaccagaacttcgcctggagaacagagtgcaaccagtgtaaggccccaaagcctgaaggcttcctcccgccaccctttccgcccccgggtggtgatcgtggcagaggtggccctggtggcatgcggggaggaagaggtggcctcatggatcgtggtggtcccggtggaatgttcagaggtggccgtggtggagacagaggtggcttccgtggtggccggggcatggaccgaggtggctttggtggaggaagacgaggtggccctggggggccccctggacctttgatggaacagatgggaggaagaagaggaggacgtggaggacctggaaaaatggataaaggcgagcaccgtcaggagcgcagagatcggccctactagatgcagagaccccgcagagctgcattgactaccagatttattttttaaaccagaaaatgttttaaatttataattccatatttataatgttggccacaacattatgattattccttgtctgtactttagtatttttcaccatttgtgaagaaacattaaaacaagttaaatggtagtgtgcggagtttttttttcttccttcttttaaaaatggttgtttaagactttaacaatgggaaccccttgtgagcatgctcagtatcattgtggagaaccaagagggcctcttaactgtaacaatgttcatggttgtgatgttttttttttttttttaaaataaaattccaaatgtttaataaaaaaaaaaaaaaaaaaa

SEQ ID NO: 5990 - protein, 656 aa, Homo sapiens
MASTDYSTYSQAAAQQGYSAYTAQPTQGYAQTTQAYGQQSYGTYGQPTDVSYTQAQTTATYGQTAYATSYGQPPTGYTTPTAPQAYSQPVQGYGTGAYDTTTATVTTTQASYAAQSAYGTQPAYPAYGQQPAATAPTRPQDGNKPTETSQPQSSTGGYNQPSLGYGQSNYSYPQVPGSYPMQPVTAPPSYPPTSYSSTQPTSYDQSSYSQQNTYGQPSSYGQQSSYGQQSSYGQQPPTSYPPQTGSYSQAPSQYSQQSSSYGQQSSFRQDHPSSMGVYGQESGGFSGPGENRSMSGPDNRGRGRGGFDRGGMSRGGRGGGRGGMGSAGERGGFNKPGGPMDEGPDLDLGPPVDPDEDSDNSAIYVQGLNDSVTLDDLADFFKQCGVVKMNKRTGQPMIHIYLDKETGKPKGDATVSYEDPPTAKAAVEWFDGKDFQGSKLKVSLARKKPPMNSMRGGLPPREGRGMPPPLRGGPGGPGGPGGPMGRMGGRGGDRGGFPPRGPRGSRGNPSGGGNVQHRAGDWQCPNPGCGNQNFAWRTECNQCKAPKPEGFLPPPFPPPGGDRGRGGPGGMRGGRGGLMDRGGPGGMFRGGRGGDRGGFRGGRGMDRGGFGGGRRGGPGGPPGPLMEQMGGRRGGRGGPGKMDKGEHRQERRDRPY

SEQ ID NO: 5991 - DNA, 2512 bp, Homo sapiens
ggacgcatagagctgcggctcgggcggcgcctccctgcggcggcccggcccggctccggcccccgctggggcaatgctccccggggccgcgggatgagccagcgatcctgaactgtgttcctgcccacagtgactcggccggtccgggcatggcagacccagtggcgggcatcgcgggttcggcggccaagagcgtgcggccatttcgctccagtgaggcctacgtggaggccatgaaggaggacctggccgagtggctcaatgccttgtacggcctgggtctcccgggtggtggcgatggcttcctgacagggctggccacgggcacgaccctgtgccaacatgccaacgccgtgaccgaggctgcccgtgcattggcagccgcccgcccggcccgaggtgtggccttccaggcgcacagtgtagtgcctggctccttcatggcgcgcgacaacgtggccaccttcatcggctggtgccgcgtggagctgggtgtgccggaggtgctcatgtttgagactgaggacctggtgctgcgcaagaacgagaagagcgtggtgctgtgcctgctggaggtggcgcggcgtggggcacgcctgggcctgctggccccacgcctcgtgcagtttgagcaggagattgagcgggagctgcgtgctgcacccccagcccccaacgcccctgccgctggggaggacaccactgaaaccgcccccgcaccagggactcctgcccgcggcccccgcatgacacccagcgacctgcgcaacctcgacgagctggtgagggagattctgggccgctgcacctgccctgaccagtttcccatgatcaaggtctcagaggggaagtaccgtgtgggggactcgagcctgctcatctttgtgcgggtgctgaggagccacgtgatggtgcgagtgggtggtggctgggacacgctggagcattacctggacaagcacgacccgtgccgctgctcctccactgctcatcgcccaccccagccgagggtctgcaccttttctccacagagggtgtcgcccaccaccagtccccgccctgctagcccagtccctgggagtgagcgccggggctcccggcctgagatgactcccgttagcttacgaagcacaaaggaggggcccgagaccccacccaggccccgggatcagctgcccccccatccccgctcccgccgctactccggggacagtgactcctcagcctcctccgcccagagcggcccccttggtacccgcagtgatgacacaggcactggcccccggagggagcgacccagccggcggctgaccacaggcaccccggcctctccgagacggcctcctgccctgcgcagccagtcccgagaccggctggatcgcggccggccccggggggccccaggaggcaggggagcccagctgtcggtccccagccctgcccggcgggcccggagccagagccgcgaggagcaggctgtgctgcttgtgcgcagggatcgagacgggcagcactcatgggtgccaaggggcaggggcagtgggggctcgggcaggagcaccccccagactccccgtgcccgcagccctgcagcaccccggctttcccgggtctccagccccagtccagagttgggcaccacaccggccagcatcttccgcacacccctgcagctcgacccgcagcaggagcagcagctgttccggcgcctggaagaggagttcctggccaatgcccgggcccttgaggctgttgctagcgtgacccccactggaccagcccctgacccagctcgggcccccgaccctccagctcctgactctgcctattgttcctccagttcctcctcttcgtccctcagcgtcctgggtggcaaatgtggccaacctggggactctggccggacggccaatgggctgcctgggccccgaagccaagccctttccagctcctccgatgaaggcagcccctgccctggcatgggggggccactagatgcacctgggagccccctggcttgcactgaaccctcgaggacctgggcacggggtcggatggacacacagccagaccgtaaaccctcacgtatccccacgcctcggggcccccgccgcccctccggacccgcagagctggggacatggcatgccctgcactcagtcaccccgagggctgagccagattcctggatgtgatggaccagctcagctgtccccagaccccatcccttctccttttcctttgtggccttaacccttctgcatcagggagccccctctgcctcttgagtaccagacctcatgggaccagaccccttgggaccacatggcacaatgggacctctgttgtacattccggttgggggatgagcgttgctatttaattactaatattattgaatgccttagaggaggccgggcgagcccggtgttctgaagacctgtggcccagcagagcctctgacagtaaagttttgctccagcaaaaaaaaaaaaaaaaaaaaaaaaaaaaa

SEQ ID NO: 5992 - protein, 681 aa, Homo sapiens
MADPVAGIAGSAAKSVRPFRSSEAYVEAMKEDLAEWLNALYGLGLPGGGDGFLTGLATGTTLCQHANAVTEAARALAAARPARGVAFQAHSVVPGSFMARDNVATFIGWCRVELGVPEVLMFETEDLVLRKNEKSVVLCLLEVARRGARLGLLAPRLVQFEQEIERELRAAPPAPNAPAAGEDTTETAPAPGTPARGPRMTPSDLRNLDELVREILGRCTCPDQFPMIKVSEGKYRVGDSSLLIFVRVLRSHVMVRVGGGWDTLEHYLDKHDPCRCSSTAHRPPQPRVCTFSPQRVSPTTSPRPASPVPGSERRGSRPEMTPVSLRSTKEGPETPPRPRDQLPPHPRSRRYSGDSDSSASSAQSGPLGTRSDDTGTGPRRERPSRRLTTGTPASPRRPPALRSQSRDRLDRGRPRGAPGGRGAQLSVPSPARRARSQSREEQAVLLVRRDRDGQHSWVPRGRGSGGSGRSTPQTPRARSPAAPRLSRVSSPSPELGTTPASIFRTPLQLDPQQEQQLFRRLEEEFLANARALEAVASVTPTGPAPDPARAPDPPAPDSAYCSSSSSSSSLSVLGGKCGQPGDSGRTANGLPGPRSQALSSSSDEGSPCPGMGGPLDAPGSPLACTEPSRTWARGRMDTQPDRKPSRIPTPRGPRRPSGPAELGTWHALHSVTPRAEPDSWM

SEQ ID NO: 5993 - DNA, 4955 bp, Homo sapiens
accacttgaagagaggttcctaatactagacagatggagagtggcttggctgtttccccctgcatattggggttgaaaacttaaatgtgtagttccagtccttctatgcagagtctctcctgccctccctccttcctgcagtctcaccacgccaccacctccctcgggggcctccgcgctgagcttccggcctctacgcctcgcttccggtcggccgccccttccttacttccggttctctatggtgcgcgggcaagctttgctccgcctccggcagtggcttactcccggtgccaggttcttggagctgtgaggaggaacaaccatgtcatcagaatcgagcaaaaaacggaagcccaaagtgatccgaagcgatggagccccagctgaaggaaagcggaatcgatctgacaccgagcaggaaggtaaatactacagtgaggaggccgaggtggatctgcgggaccctggcagagactatgagttatacaagtacacctgccaggagctacagaggctgatggctgagatccaagacctgaagagcaggggtggcaaggatgtggcaatagaaatagaagaacggaggatccagagctgtgtgcatttcatgactctaaagaagcttaaccgattagcccacatcaggttgaagaaaggaagagatcagacccacgaggctaagcagaaagtagatgcctatcatctgcagctccagaacctgttgtatgaggtgatgcacctacagaaggagatcaccaaatgtttggagtttaagtcaaagcatgaagaaattgatctggtcagtttagaggagttttataaggaggctccaccagatatcagcaaggccgaagtcaccatgggagaccctcaccagcaaacactggcacgtctggactgggagctggagcagcggaaaaggctggcagagaagtaccgagagtgcctatctaacaaggagaagattctcaaggagattgaggtgaagaaggagtacctgagcagcctccagccccgcctcaacagcatcatgcaggcttcccttccggtgcaggagtacctgtttatgccattcgaccaggctcacaagcagtatgagacagccagacacctgccgcctcccctctatgtcctctttgttcaggccactgcgtatgggcaggcctgtgataagacgttatctgtggcaatcgaaggcagtgtggatgaagccaaggctctgttcaaacctccagaggactcccaagatgacgagagtgactcagatgccgaggaggagcagactacgaagcgccggagacccacactgggggttcagttggacgacaaacgcaaggagatgctgaagaggcacccactgtctgtcatgctcgacctgaagtgcaaagatgacagtgtgcttcacctgactttctactacctcatgaacctcaacatcatgacagtaaaagccaaagtgacaactgccatggagctgatcacccccatcagtgcaggtgacttgctgtctcctgactcagtcctgagttgcttgtatcctggggatcatggaaagaaaactccgaatccagccaatcagtatcagtttgataaagttggcatcctgactttgagcgactatgtacttgagctaggtcacccctatttgtgggtgcagaagctgggtggcctccacttccccaaagagcagccccagcaaacagtgattgctgaccactcgctgagcgccagccacatggagaccaccatgaaacttctgaagaccagggtgcagtcccgcctggccctccacaaacagtttgcatccctagaacatggcattgtgccagttaccagtgattgccagtacctcttccctgccaaggttgtctctcgcctggtgaaatgggtgacagttgcccatgaggattacatggagctgcacttcaccaaagacattgtggatgcgggactggctggggacaccaatctctactacatggcgctcatcgaaaggggcacagccaaactgcaggccgctgtggtgttgaaccctggctactcctccatcccacctgttttccagctctgtttgaactggaaaggggagaaaaccaacagcaacgatgacaacattcgggccatggagggcgaagtcaatgtgtgctacaaggagctgtgtggcccttggcccagccaccagctgttgaccaaccagctgcagcggctgtgtgtgctgctggatgtttacctggagaccgagagccatgacgacagtgtggaggggcccaaggaatttccccaggagaagatgtgtctgcggctcttcaggggtcctagcaggatgaagccatttaaatacaaccatcctcagggattcttcagccatcgctgatctcccgcgcagaccgttgtttcccccaaggcctcaccctgagcactgggcttctgctttctgctctggcccacatgtgactcttgatattctccaaagacaccagccaattaaaaagcgtcacctgaccagtggcctttgtctgtggttcctggcaaggtggctttgcagtctggaagggcaggtgggagctgtgacacagtgtgaaaaagcatttgtagagagactttttctcagcagccaataaaagcagagtggaaaaagattccaattctgcagagagatgctcacctcttgtctacgcacaccctatttgtgctttgcggggtgaggtcctcatgatcttgtatttattatcccaagttcctgctgttaagaggtggtaggagaagccaaaggcagcagagcacaaaaagcaaaactcttccctccccacccgctcttcccattagtcctgtcagggttgccgatggacaaattgtctctgatcgttggatgttataaatgtctgacagtgcagtgcaaacagaagacaaactcagttgatccttgaacaactcaggggttaggggcaccaacaccccctgccctgcacagttgaaaaatccgtgtataacttttgactccctaaaaacttaactaatagcctgctgttgaccagtagtatgctattagtagttacttactgctaacatagtcagtacatattttcagtatatattttgtatcttatacactgtattcttacaatacagtaaactagagaaaagaaaatgttataaggaaagtcacaagggggcctgagtgcagtggctcacgtctgtaatcccagcactttgggaggccaaggcgggtggatcacttgaggtcaggagtttgagaccagcctggccgacatggtgaaaccctgtctctactaaaaacatggaaattagccaagcgtggtggcgcatgcctgtagtcccagttactcaggaggctgaggcagaattacttgaacccatgaggcagaggttgcagtaagccaagatcacgctcctgcgctccggcttgggcgagagtgagactccgtctcaaaaataaataaataagaaagccataaggaagaaaatatatatctactattaagtagaagtggatcaccataaaggtcttcacatactgtctcagggttgaatagtctaaggaagaggaggggttggtcttggtgtctcagggatggcagaggcagaaaaagtgggggaggtggagggggaggcaggcaccactgttatttttattgaacaaaatctgtgcagggactcatgactgtaatcctagtactttggaaagctaaggcgggaggatcccttgaggccaggagttcaggtccagcctgggcaacgtagtgagagaccctgtatctacaaaaaatttaaaaatcagccaggtgtggtggtatgcaccaatagtcccagttactcagaaggctgaggtgggcggatgactggagtccaggagttcaaggtagcagtgagctattcatcgtgcctgtactgtactccagcctgggaaacaatgcgagtccctatctctaaaaaattttaaaaaaagaaatctgcatataatagacccacagagtccaaactattgttcagagatcaactgtacttcacagagagtaattctaagtcttacaggatttcatggagatggcgagagtggtgttggagaatcaatcacatacagagatacaggacagtgagaccaggtaacatttgaggagaatattttttttttattgagacagggtcttgctctgttgtccaggctggagtgcagtggcacgaacacagctcactgccgcctcaacctctcctgggttcaagtgatcctcctgcctcagcctcccaagtagctgggaccacaggtgtgtgccaccatttctggctaatttttaaattttttgtagaggcgggatcccactatttttcccaggctggtctcaaactcctgggctcaaatgatcctcccacctcggcctcccaaagtgctaggattataggcatgagccaccacacccggcctgagtagagtctttaaggtaatgacaaaagtgcctcaaaatataattatttgattaagagaagtcttgggaagataggtaacaacctttaaaatgttcataaaattacatcctttgtaatactcctgcaagtcaaagtaaaggatggcatagactattcttggacagttttgtcaaaaagtgtatcttgaccccaccatcagtactccattcttcattttaaaaaataagatgggctgggcacagtggcttacgcctttaatatcagtactttgggaggctggtgggcggatcacctgagatcaggagttcaagaccagcctggccaacatggtgaaaccccgtctctactaaaaatacaaaaattagctgggcatggtggtgcgcgcctgtaatcccagccactcgggaggctgaggcaggagaattgcttgaatccccgaggcggaggttgcactgagccgagatggtgccactgcaccatctggacaacagagcaagactccgtcttgg

SEQ ID NO: 5994 - DNA, 2257 bp, Homo sapiens
acggcagccgtcagggaccgtcccccaactcccctttccgctcaggcagggtcctcgcggcccatgctggccgctggggacccgcgcagcccagaccgttcccgggccggccagccggcaccatggtggccctgaggcctgtgcagcaactccaggggggctaaagggctcagagtgcaggccgtggggcgcgagggtcccgggcctgagccccgcgccatggccggggccatcgcttcccgcatgagcttcagctctctcaagaggaagcaacccaagacgttcaccgtgaggatcgtcaccatggacgccgagatggagttcaattgcgagatgaagtggaaagggaaggacctctttgatttggtgtgccggactctggggctccgagaaacctggttctttggactgcagtacacaatcaaggacacagtggcctggctcaaaatggacaagaaggtactggatcatgatgtttcaaaggaagaaccagtcacctttcacttcttggccaaattttatcctgagaatgctgaagaggagctggttcaggagatcacacaacatttattcttcttacaggtaaagaagcagattttagatgaaaagatctactgccctcctgaggcttctgtgctcctggcttcttacgccgtccaggccaagtatggtgactacgaccccagtgttcacaagcggggatttttggcccaagaggaattgcttccaaaaagggtaataaatctgtatcagatgactccggaaatgtgggaggagagaattactgcttggtacgcagagcaccgaggccgagccagggatgaagctgaaatggaatatctgaagatagctcaggacctggagatgtacggtgtgaactactttgcaatccggaataaaaagggcacagagctgctgcttggagtggatgccctggggcttcacatttatgaccctgagaacagactgacccccaagatctccttcccgtggaatgaaatccgaaacatctcgtacagtgacaaggagtttactattaaaccactggataagaaaattgatgtcttcaagtttaactcctcaaagcttcgtgttaataagctgattctccagctatgtatcgggaaccatgatctatttatgaggagaaggaaagccgattctttggaagttcagcagatgaaagcccaggccagggaggagaaggctagaaagcagatggagcggcagcgcctcgctcgagagaagcagatgagggaggaggctgaacgcacgagggatgagttggagaggaggctgctgcagatgaaagaagaagcaacaatggccaacgaagcactgatgcggtctgaggagacagctgacctgttggctgaaaaggcccagatcaccgaggaggaggcaaaacttctggcccagaaggccgcagaggctgagcaggaaatgcagcgcatcaaggccacagcgattcgcacggaggaggagaagcgcctgatggagcagaaggtgctggaagccgaggtgctggcactgaagatggctgaggagtcagagaggagggccaaagaggcagatcagctgaagcaggacctgcaggaagcacgcgaggcggagcgaagagccaagcagaagctcctggagattgccaccaagcccacgtacccgcccatgaacccaattccagcaccgttgcctcctgacataccaagcttcaacctcattggtgacagcctgtctttcgacttcaaagatactgacatgaagcggctttccatggagatagagaaagaaaaagtggaatacatggaaaagagcaagcatctgcaggagcagctcaatgaactcaagacagaaatcgaggccttgaaactgaaagagagggagacagctctggatattctgcacaatgagaactccgacaggggtggcagcagcaagcacaataccattaaaaagctcaccttgcagagcgccaagtcccgagtggccttctttgaagagctctagcaggtgacccagccaccccaggacctgccacttctcctgctaccgggaccgcgggatggaccagatatcaagagagccatccatagggagctggctgggggtttccgtgggagctccagaactttccccagctgagtgaagagcccagcccctcttatgtgcaattgccttgaactacgaccctgtagagatttctctcatggcgttctagttctctgacctgagtctttgttttaagaagtatttgtct

SEQ ID NO: 5995 - protein, 595 aa, Homo sapiens
MAGAIASRMSFSSLKRKQPKTFTVRIVTMDAEMEFNCEMKWKGKDLFDLVCRTLGLRETWFFGLQYTIKDTVAWLKMDKKVLDHDVSKEEPVTFHFLAKFYPENAEEELVQEITQHLFFLQVKKQILDEKIYCPPEASVLLASYAVQAKYGDYDPSVHKRGFLAQEELLPKRVINLYQMTPEMWEERITAWYAEHRGRARDEAEMEYLKIAQDLEMYGVNYFAIRNKKGTELLLGVDALGLHIYDPENRLTPKISFPWNEIRNISYSDKEFTIKPLDKKIDVFKFNSSKLRVNKLILQLCIGNHDLFMRRRKADSLEVQQMKAQAREEKARKQMERQRLAREKQMREEAERTRDELERRLLQMKEEATMANEALMRSEETADLLAEKAQITEEEAKLLAQKAAEAEQEMQRIKATAIRTEEEKRLMEQKVLEAEVLALKMAEESERRAKEADQLKQDLQEAREAERRAKQKLLEIATKPTYPPMNPIPAPLPPDIPSFNLIGDSLSFDFKDTDMKRLSMEIEKEKVEYMEKSKHLQEQLNELKTEIEALKLKERETALDILHNENSDRGGSSKHNTIKKLTLQSAKSRVAFFEEL

SEQ ID NO: 5996 - DNA, 2808 bp, Homo sapiens
ggcacgaggccggaagtgcgggcgctcagggagctgtcaccgtggtcggcggcggcggcggcggcggcggcacagagccggtggtggagccgccgaggagggtcacgcagcacaatgccagctctgcccctggaccaactccagatcacccacaaggacccgaagacaggaaagctgaggacttcaccagcgctgcaccccgagcagaaggcagaccggtattttgtgttatacaaaccgccccctaaagacaacattcccgccctagtggaggagtacctggaacgcgccaccttcgtagccaatgacctcgactggctcctggccttgcctcacgataaattctggtgccaggtgatctttgacgagactctacagaagtgcctggactcctacctgcgctatgtcccccgcaaattcgacgagggggtggcctcagcccctgaggttgttgacatgcagaagcgcctccatcgaagtgtttttctcaccttcctccgcatgtccactcacaaggaatccaaagatcacttcatttccccttctgcgtttggagaaatcctctacaataacttcctctttgacattccaaagatcctggacctctgcgtgctctttggaaaaggcaactcaccactgctccagaagatgataggaaacatctttacacagcagccaagttactacagtgacctggatgaaaccctgcctaccatccttcaggtcttcagcaatatcctccagcactgtggtttgcaaggggacggggccaataccacaccccagaagcttgaggagaggggccgattgacccccagtgacatgcctctcctggaattaaaggacattgttctctacctttgtgatacctgcaccacactttgggcctttctggatatcttccctttggcttgccagaccttccagaagcacgacttttgttacagactagcttccttctacgaagcagcaattcccgaaatggagtctgcaattaagaagaggaggcttgaagatagcaagcttcttggtgacctgtggcagaggctctcccattccaggaagaagctaatggagattttccacatcatcctgaaccagatctgcctccttcccatcctagaaagcagctgtgacaacattcagggcttcatcgaagagttccttcagatcttcagctccttgctgcaggagaagaggttcctccgggactatgatgcactcttccccgtggccgaagacatcagcttgctgcagcaggcctcatcagtcttggacgagacgcggactgcctacatcctccaggcagtcgagagtgcatgggaaggggtggacagacggaaagccacagatgctaaagacccatcggtgattgaggagcctaatggggagcctaacggggtcacggtgacagcagaggcagtcagtcaagcatcatcacatccggagaactcggaggaagaggagtgcatgggagcagccgcggctgtgggccctgccatgtgtggggtggaactggactctctcatctcccaagtgaaggacctgctgccagaccttggtgagggcttcatcctggcctgcctggagtactaccactacgacccagagcaggtgatcaacaatatcctggaggagcggctggcccccaccctcagccagctggaccgcaacctagacagagaaatgaaaccagaccctacacccctgctgacgtctcgccacaacgtcttccagaatgacgagtttgatgtgttcagcagggactcagtagacctgagccgggtgcacaagggcaagagcaccaggaaggaggaaaacacgcggagtttgctgaacgacaagcgtgcagtggcggcacagcggcagcgctacgagcagtacagcgtggtggtggaggaggtgccactgcagccaggcgagagcctgccctaccacagtgtctactacgaggatgagtacgatgacacatacgatggcaaccaggtgggcgccaatgatgcagactctgatgacgagctcatcagccgcaggccattcaccatccctcaggtgctgagaaccaaagtgcctagagaagggcaggaggaggatgacgacgatgaggaagacgatgctgacgaggaggctcccaagcccgaccattttgttcaggaccctgcagtgctgagagagaaggcagaagccaggcgcatggcctttctcgccaagaaagggtaccggcatgacagctcaacagcagtggccggcagcccccgaggccatgggcagagccgcgagacaacccaggaacgcaggaagaaggaagccaacaaggcgacaagagccaaccacaaccggagaaccatggccgaccgcaagaggagcaaaggcatgatcccatcctgagacctggtgcagggccagtggggaggcagcggcaccagactcaccaggccgtgctcccatcgcctggggcctcctcactaggggccccaagttcaactcaacccctcaacagcctcagctttgcagcccctgagaaggccgcctctcatctaccagccagccatgagcgccttcctgcagaacacacagtgccttatgccacagccgaagaatccgtggggccggcaagcaggcaccttcccccagctgcgctagcgggaaagagatggggatggagtcccaaggcaagcgccccaaacctcgggccacaagacaccacttcccctttaccctggacagcaggaaacctgtatattcaaaaacacaaaaagtcctgctaataaaatttttgaccctttcaaaaaaaaaaaaaaaaaaaaa

SEQ ID NO: 5997 - protein, 757 aa, Homo sapiens
MPALPLDQLQITHKDPKTGKLRTSPALHPEQKADRYFVLYKPPPKDNIPALVEEYLERATFVANDLDWLLALPHDKFWCQVIFDETLQKCLDSYLRYVPRKFDEGVASAPEVVDMQKRLHRSVFLTFLRMSTHKESKDHFISPSAFGEILYNNFLFDIPKILDLCVLFGKGNSPLLQKMIGNIFTQQPSYYSDLDETLPTILQVFSNILQHCGLQGDGANTTPQKLEERGRLTPSDMPLLELKDIVLYLCDTCTTLWAFLDIFPLACQTFQKHDFCYRLASFYEAAIPEMESAIKKRRLEDSKLLGDLWQRLSHSRKKLMEIFHIILNQICLLPILESSCDNIQGFIEEFLQIFSSLLQEKRFLRDYDALFPVAEDISLLQQASSVLDETRTAYILQAVESAWEGVDRRKATDAKDPSVIEEPNGEPNGVTVTAEAVSQASSHPENSEEEECMGAAAAVGPAMCGVELDSLISQVKDLLPDLGEGFILACLEYYHYDPEQVINNILEERLAPTLSQLDRNLDREMKPDPTPLLTSRHNVFQNDEFDVFSRDSVDLSRVHKGKSTRKEENTRSLLNDKRAVAAQRQRYEQYSVVVEEVPLQPGESLPYHSVYYEDEYDDTYDGNQVGANDADSDDELISRRPFTIPQVLRTKVPREGQEEDDDDEEDDADEEAPKPDHFVQDPAVLREKAEARRMAFLAKKGYRHDSSTAVAGSPRGHGQSRETTQERRKKEANKATRANHNRRTMADRKRSKGMIPS

SEQ ID NO: 5998 - DNA, 423 bp, Homo sapiens
atggcttggggagtcagtgccaaatggagtaacgagggcatcacaagtgtgggtgacccacagtgggaatgccagagttggagcctgagcaggaaagattggtatgatgtgaaagcacctgctatgttcagtataataactatgggaaagacactcatcgccaggactcaaggaatcaaaattgcatctgatggcctcaagggtcatgtgtttgaagtctgccaaatccagaagaagatgatggaaatcatgacccaagaggtgcagacaaatgacttgaaagaagtggtcaataaattgattccagacagcactggaaaagacatagaaaaggcttgcctatctgtttatcctctccatggtgtcttcattaggaaagtaaaaataaagaagcccaagtttgaattgggaaaactcatgtag

SEQ ID NO: 5999 - DNA, 2944 bp, Homo sapiens
ggcacgaggccgcaactcgctcggccgccgccatcttgcgagctcgtcgtactgaccgagcggggaggctgtcttgaggcggcaccgctcaccgacaccgaggcggactggcagccctgagcgtcgcagtcatgccggccggacccgtgcaggcggtgcccccgccgccgcccgtgcccacggagcccaaacagcccacagaagaagaagcatcttcaaaggaggattctgcaccttctaagccagttgtggggattatttaccctcctccagaggtcagaaatattgttgacaagactgccagctttgtggccagaaacgggcctgaatttgaagctaggatccgacagaacgagatcaacaaccccaagttcaactttctgaaccccaatgacccttaccatgcctactaccgccacaaggtcagcgagttcaaggaagggaaggctcaggagccgtccgccgccatccccaaggtcatgcagcagcagcagcagaccacccagcagcagctgccccagaaggtccaagcccaagtaatccaagagaccatcgtgcccaaagagcctcctcctgagtttgagttcattgctgatcctccctctatctcagccttcgacttggatgtggtgaagctgacggctcagtttgtggccaggaatgggcgccagtttctgacccagctgatgcagaaagagcagcgcaactaccagtttgactttctccgcccacagcacagcctcttcaactacttcacgaagctagtggaacagtacaccaagatcttgattccacccaaaggtttattttcaaagctcaagaaagaggctgaaaacccccgagaagttttggatcaggtgtgttaccgagtggaatgggccaaattccaggaacgtgagaggaagaaggaagaagaggagaaggagaaggagcgggtggcctatgctcagatcgactggcatgattttgtggtggtggaaacagtggacttccaacccaatgagcaagggaacttccctccccccaccacgccagaggagctgggggcccgaatcctcattcaggagcgctatgaaaagtttggggagagtgaggaagttgagatggaggtcgagtctgatgaggaggatgacaaacaggagaaggcggaggagcctccttcccagctggaccaggacacccaagtacaagatatggatgagggttcagatgatgaagaagaagggcagaaagtgcccccacccccagagacacccatgcctccacctctgcccccaactccagaccaagtcattgtccgcaaggattatgatcccaaagcctccaagcccttgcctccagcccctgctccagatgagtatcttgtgtcccccattactggggagaagatccccgccagcaaaatgcaggaacacatgcgcattggacttcttgaccctcgctggctggagcagcgggatcgctccatccgtgagaagcagagcgatgatgaggtgtacgcaccaggtctggatattgagagcagcttgaagcagttggctgagcggcgtactgacatcttcggtgtagaggaaacagccattggtaagaagatcggtgaggaggagatccagaagccagaggaaaaggtgacctgggatggccactcaggcagcatggcccggacccagcaggctgcccaggccaacatcaccctccaggagcagattgaggccattcacaaggccaaaggcctggtgccagaggatgacactaaagagaagattggccccagcaagcccaatgaaatccctcaacagccaccgccaccatcttcagccaccaacatccccagctcggctccacccatcacttcagtgccccgaccacccacaatgccacctccagttcgtactacagttgtctccgcagtacccgtcatgccccggcccccaatggcatctgtggtccggctgcccccaggctcagtgatcgcccccatgccgcccatcatccacgcgcccagaatcaacgtggtgcccatgcctccctcggcccctcctattatggccccccgcccaccccccatgattgtgccaacagcctttgtgcctgctccacctgtggcacctgtcccagctccagccccaatgccccctgtgcatcccccacctcccatggaagatgagcccacctccaaaaaactgaagacagaggacagcctcatgccagaggaggagttcctgcgcagaaacaagggtccagtgtccatcaaagtccaggtgcccaacatgcaggataagacggaatggaaactgaatgggcaggtgctggtcttcaccctcccactcacggaccaggtctctgtcattaaggtgaagattcatgaagccacaggcatgcctgcagggaaacagaagctacagtatgagggtatcttcatcaaagattccaactcactggcttactacaacatggccaatggcgcagtcatccacctggccctcaaggagagaggcgggaggaagaagtagacaagaggaacctgctgtcaagtccctgccattttgcctctcctgtctcccaccccctgccccagacccaggagcccccctgaggctttgccttgcctgcatatttgtttcgctcttactcagtttgggaattcaaattgtcctgcagaggttcattcccctgaccctttccccacattggtaagagtagctgggttttctaagccactctctggaatctctttgtgttagggtctcgatttgaggacattcatttcttcagcagcccattagcaactgagagcccagggatgtcctacaggatagtttcatagtgacaggtggcacttggctaatagaatatggctgatattgtcattaatcattttgtaccttgacatgggttgtctaataaaactcggacccttcttgtgaaaaaaaaaaaaaaaaaa

SEQ ID NO: 6000 - protein, 793 aa, Homo sapiens
MPAGPVQAVPPPPPVPTEPKQPTEEEASSKEDSAPSKPVVGIIYPPPEVRNIVDKTASFVARNGPEFEARIRQNEINNPKFNFLNPNDPYHAYYRHKVSEFKEGKAQEPSAAIPKVMQQQQQTTQQQLPQKVQAQVIQETIVPKEPPPEFEFIADPPSISAFDLDVVKLTAQFVARNGRQFLTQLMQKEQRNYQFDFLRPQHSLFNYFTKLVEQYTKILIPPKGLFSKLKKEAENPREVLDQVCYRVEWAKFQERERKKEEEEKEKERVAYAQIDWHDFVVVETVDFQPNEQGNFPPPTTPEELGARILIQERYEKFGESEEVEMEVESDEEDDKQEKAEEPPSQLDQDTQVQDMDEGSDDEEEGQKVPPPPETPMPPPLPPTPDQVIVRKDYDPKASKPLPPAPAPDEYLVSPITGEKIPASKMQEHMRIGLLDPRWLEQRDRSIREKQSDDEVYAPGLDIESSLKQLAERRTDIFGVEETAIGKKIGEEEIQKPEEKVTWDGHSGSMARTQQAAQANITLQEQIEAIHKAKGLVPEDDTKEKIGPSKPNEIPQQPPPPSSATNIPSSAPPITSVPRPPTMPPPVRTTVVSAVPVMPRPPMASVVRLPPGSVIAPMPPIIHAPRINVVPMPPSAPPIMAPRPPPMIVPTAFVPAPPVAPVPAPAPMPPVHPPPPMEDEPTSKKLKTEDSLMPEEEFLRRNKGPVSIKVQVPNMQDKTEWKLNGQVLVFTLPLTDQVSVIKVKIHEATGMPAGKQKLQYEGIFIKDSNSLAYYNMANGAVIHLALKERGGRKK

SEQ ID NO: 6001 - DNA, 621 bp, Homo sapiens
atgaggtgggcgaggctttccgctctcttgtgccagcggcgggtggtgtggctgagctatggcgtggccagctcctacgtgctggcggatgccattgacaaaggcaagaaggctggagaggtgcccagccctgaagcaggccgcagcgccagggtgactgtggctgtggtggacacctttgtatggcaggctctagcctctgtggccattccgggcttcaccatcaaccgcgtgtgtgctgcctctctctatgtcctgggcactgccacccgctggcccctggctgtccgcaagtggaccaccaccgcgcttgggctgttgaccatccccatcattatccaccccattgacaggtcggtggatttcctcctggactccagcctgcgcaagtctacccaacagtggggaagcccagctcctcctgatcatactctggtacctggcctgtgcatcggcctcctgcttcatgtcaacctcctactcctgccagggaatgtggacacctggctccctggtgtccaaagaccctggcacctgggtgggtttgagctggacagaagcttagagacaaaggcttcaagaagcagtggctgcagggagtcacagaagggcaggacctga

SEQ ID NO: 6002 - protein, 206 aa, Homo sapiens
MRWARLSALLCQRRVVWLSYGVASSYVLADAIDKGKKAGEVPSPEAGRSARVTVAVVDTFVWQALASVAIPGFTINRVCAASLYVLGTATRWPLAVRKWTTTALGLLTIPIIIHPIDRSVDFLLDSSLRKSTQQWGSPAPPDHTLVPGLCIGLLLHVNLLLLPGNVDTWLPGVQRPWHLGGFELDRSLETKASRSSGCRESQKGRT

SEQ ID NO: 6003 - DNA, 2257 bp, Homo sapiens
cacgaggaagtggagctgcctgtacgcgcggccctagtcggctcctcaacgtggagcgatgggaggccttgagaagaagaagtatgaacgaggctcggccaccaactacatcacccggaacaaagcccggaagaagctccagctgagcttggctgactttaggcggctgtgcattctgaagggcatttatccccatgaacccaaacacaagaagaaggttaacaagggttctacagcagcccgaacgttttaccttatcaaagacatcaggtttctcctccacgaacccattgtcaacaagttccgtgaatacaaggtgttcgtccggaagctccggaaggcttatgggaagagcgagtggaacactgtagagcgtttaaaggacaataagcccaactacaaactcgaccacatcatcaaggaacggtatcccacgttcatcgatgccctgcgggacctggacgatgccctctccatgtgcttcctgttttccaccttcccgcggactggcaagtgccacgtgcagaccattcagctgtgccgccggctcactgtggagttcatgcactacattatcgctgcccgtgccctgcgcaaggtcttcctgtccatcaaaggcatttactaccaggccgaggtactggggcagcccatcgtgtggatcactccctatgccttctcccatgaccacccgacagacgtggactacagggtcatggccaccttcaccgagttctacaccacgctgctgggctttgtcaacttccgcctttaccagttgctcaacctccactatcccccgaagctcgagggtcaggcccaagcagaggcaaaggccggtgagggcacctacgcgttggactccgagagttgtatggagaaactggcagccctcagtgccagcctggcccgcgtggtggtgcctgccacagaggaggaggccgaggtggatgagtttcccaccgatggggagatgtcagcgcaggaggaagaccgcaggaaggagctggaggcgcaggagaagcacaagaagctttttgagggcctgaagttcttcctgaaccgagaggtgccccgtgaggccctggccttcatcatcaggagttttggtggggaagtgtcctgggacaaatctttgtgcattggggccacctatgacgtcacagactcccgcatcacccatcagattgtcgaccggcctgggcagcagacctcagtcattggcaggtgctacgtgcagccccagtgggtgtttgactcagtgaacgccaggctccttctccccgtggcagagtacttctctggggtgcagctgcccccacacctttcaccctttgtgaccgagaaggaaggagattacgttccacctgagaagctgaagctgctggctctgcagcggggagaggacccaggaaacctgaatgagtcagaagaggaggaggaagaggacgacaacaacgaaggtgatggtgatgaagagggagaaaatgaggaggaggaggaagatgcagaggctggttcagaaaaggaggaagaggcccggctggcagccctggaagagcagaggatggaggggaagaagcccagggtgatggcaggcaccttgaagctggaggataagcagcggctggcccaggaggaggagagtgaggccaagcgcctggccattatgatgatgaagaagcgggagaagtacctgtaccagaagatcatgtttggcaagaggcgaaaaatccgagaggccaacaagctggcggagaagcggaaagcccacgatgaggcggtgaggtctgagaagaaggccaagaaggcaaggccggagtgagtgcctgcggcccctcacagggctgaggccagcccctagcagctggatgtggcagaggcaggccagaggacctaagtgtgatggaccagagtcacttctcctcctcctttctccagccagccctgacccctcatgctctctggctgggccagtgggcagccctcgcttcccttggatggagctgccctgctggtgcctggtcagagaagaggcctctgtgcccagcctgattctctgctcccaggagccagtgacatgaggtgcagaggcccacccagccccctacctactgcccccattcatcctggctttccacagccccctcccacacagttggacccgtgattctcagggtgctgtgatggggtgagggtagggggagcatttgttattaaatgactggacttttgaaaaaaaaaaaaaaaaaaaaaa

SEQ ID NO: 6004 - protein, 588 aa, Homo sapiens
MGGLEKKKYERGSATNYITRNKARKKLQLSLADFRRLCILKGIYPHEPKHKKKVNKGSTAARTFYLIKDIRFLLHEPIVNKFREYKVFVRKLRKAYGKSEWNTVERLKDNKPNYKLDHIIKERYPTFIDALRDLDDALSMCFLFSTFPRTGKCHVQTIQLCRRLTVEFMHYIIAARALRKVFLSIKGIYYQAEVLGQPIVWITPYAFSHDHPTDVDYRVMATFTEFYTTLLGFVNFRLYQLLNLHYPPKLEGQAQAEAKAGEGTYALDSESCMEKLAALSASLARVVVPATEEEAEVDEFPTDGEMSAQEEDRRKELEAQEKHKKLFEGLKFFLNREVPREALAFIIRSFGGEVSWDKSLCIGATYDVTDSRITHQIVDRPGQQTSVIGRCYVQPQWVFDSVNARLLLPVAEYFSGVQLPPHLSPFVTEKEGDYVPPEKLKLLALQRGEDPGNLNESEEEEEEDDNNEGDGDEEGENEEEEEDAEAGSEKEEEARLAALEEQRMEGKKPRVMAGTLKLEDKQRLAQEEESEAKRLAIMMMKKREKYLYQKIMFGKRRKIREANKLAEKRKAHDEAVRSEKKAKKARPE

SEQ ID NO: 6005 - DNA, 4467 bp, Homo sapiens
cgagactcagattgtctgaattgagctatcgcaacttaatgctaaaagctccttaaagctacagatttatgacatagttccttccaaaatattacatcataaatcattgagaagattaaaaaaaaacacttgaagaaattgtagttttaaacatctctgcatatattttggatagctactaggttactttaactgtcattaaggagcacagacttactgaagctttactggacagaatcctgggaaatcgatatcattataaggttatatttcccagttagcgggtgaagggctggagaccttattgcagtcatggctttcacaaattacagcagtctgaatcgagctcagctaacctttgaatatctgcacacaaattcgtaagtatcctctaggtgccactgaggtaaccagtaactcgttccttgatattatatggaaatcgtttccccagaaaattttgctttttcactttttgagatgtatcccactggagtgaaatgtgtcactggatatcttgagctctgtattgaagaactgagatcagtgaaatacttgttgctaatccagaagaatctgatttttgtttattggatcaaaattttctaaatgcaaactttagttatttgaagtcaatatgttgagttgtttcattcaagtgtttataggaatccaacaaatactgctctattggatcgccaaatgttggactattttagtatcaaccgtttcccctctgtagtgacaacgtcctaaacagttaggtttataacaagtgtttactttctaacaagaaaacagaagacatttaaatgacaactttcaagaagaaaatttttattttttcagaagttggcattatcttcctggcagattgctcacatccaatattatttgtatatgctaaacaggaaacggcaacttgtttatatctctatttagatagtctttccccaaaatttccacagaaacatacagtgttcatggttcttgagttcatgaaggagtaatctaatcactccaacatggtctggaatgtttcaggtttaatccatatgcccactctcttggaggctgtccagtagcgtcaaaactttagtgttttaatacattcacctgttacttttgagatgaagttcacctttcttggatcacatgcaaaggatgtttaggtctgtgaagaaaagaatttctaggccgggtgctgtggctcacgcctgtaatcccagcactttgggaggccgagaaccactcacgaattcttgtttggtgctcttgctgaactggttgataatgcaagagatgctgatgccaccagaatagatatttatgcagaaagacgagaggaccttcgaggaggatttatgctttgctttttggatgatggagcaggaatggatccaagtgatgctgccagtgtgatccagtttgggaagtcggccaagcgaacacctgagtctactcagattgggcagtacgggaatgggttaaaatcgggctcaatgcgcattgggaaggattttatcctgttcaccaagaaggaagacaccatgacgtgcctcttcctgtctcgcacgtttcatgaggaagaaggcattgatgaagtgatagtcccactgcccacctggaatgctcggacccgggaacctgtcacagacaatgtagagaaatttgccattgagacagaactcatctataagtactctccattccgcactgaggaggaagtgatgacccagtttatgaagattcctggggacagcggaacattggtgatcatcttcaatctcaaactcatggataatggagagccagaactagacataatctcaaatccaagagatatccagatggcagagacgtccccagagggcacgaagccagagcggcgctcgttccgtgcctatgccgctgtgctctatattgatccccggatgaggatcttcatccatgggcacaaggtgcagaccaagaggctctcctgctgcctgtacaagcccaggatgtacaagtacacgtcaagccgtttcaagacccgtgcggagcaggaggtgaagaaagcagagcacgtagcaaggattgctgaagagaaggcgcgggaggcagagagcaaagctcggacattagaagtacgcctaggtggagacctcacgcgggactccagggtgatgttgcgacaggtccagaacagagccatcactctgcgcagagaagccgatgtcaagaagaggatcaaggaggccaagcagcgagcacttaaagaacctaaggaactgaattttgtttttggtgtcaacattgaacaccgggatctggatggcatgttcatctacaactgtagccgactgatcaaaatgtatgagaaagtgggcccacagctggaagggggcatggcatgtggcggggttgttggggttgttgatgtgccctacctggtcctggagcctacacacaacaaacaggactttgctgatgccaaggagtaccggcacctgctccgagcaatgggggagcacctggcgcagtattggaaggatattgccatcgcccagaggggaatcatcaagttctgggatgagtttggctacctctctgccaactggaaccagcccccgtccagtgagctgcgttacaaacgccggagagctatggaaatccccaccaccatccagtgcgatttgtgtctgaaatggagaaccctccccttccagctgagttctgtggaaaaagattaccctgacacctgggtttgctccatgaaccctgatcctgaacaggaccggtgtgaggcttctgaacaaaagcagaaggttcccctgggaacattcagaaaggacatgaagacgcaggaagagaagcagaaacaactgacagagaaaattcgccagcagcaggagaagctggaggcccttcagaaaaccacacccatccgctcccaagcagacctgaagaaattgcccttggaagtgaccaccagaccttccactgaggaacctgtgcgtagacctcagcgtcctcggtcgccccctttacctgctgtgatcaggaacgcccccagcagacccccttctttgccaactcctagaccagccagccagccccgaaaggctcctgtcatcagcagtaccccaaagctccctgctttggcagcccgggaggaggccagcacatctaggctgctccagccacctgaggcaccccgaaagcctgccaacactctcgtcaagactgcatcccgacctgcccctctggtgcagcaactgtcaccatctttactgcccaactccaagagccctcgggaggttccttctcccaaagtcatcaagactccagtggtgaagaagacagagtcacccatcaaactctccccggctacccctagtcggaagcggagtgtcgcagtttctgatgaggaagaagttgaggaggaagctgagaggaggaaggagaggtgcaagcggggcagatttgttgtgaaggaggaaaagaaggactcgaatgagctctcagacagtgctggggaagaggactcggctgacctcaagagagctcagaaagataaagggctgcacgtggaggtgcgtgtgaacagggagtggtacacgggccgtgtcacagccgtggaggtgggcaagcatgtggtgcggtggaaggtgaagtttgactacgtgcccacagacacgacaccaagagaccgctgggtggagaaaggcagtgaggatgtgcggctgatgaaacccccttctccggaacatcagagccttgatacacaacaggagggcggggaggaggaggtgggccctgtggcccagcaggccatagctgtcgcagagccctccacttccgaatgcctccgcattgagcctgacaccactgccctgagcaccaatcacgagaccatcgacctgcttgtccagatcctccggaattgtttacggtacttcctgcctccaagtttccccatctccaagaagcagctgagtgctatgaattcagatgagctaatatcttttcctctgaaggagtacttcaagcaatatgaagtagggctccaaaacctgtgcaattcctaccagagccgtgctgactcccgggccaaggcctccgaggaaagcctgcgcacctccgagaggaagctccgcgagacggaggagaagctgcagaagctgaggaccaacatcgtggcactcctgcaaaaggtgcaggaggacatagacatcaacacagatgatgagctggacgcctacattgaggacctcatcaccaagggggactgaaggcaggagagagagcagctcccctgcccacctgcccctcaaccctgtagctgcagggggaggggacttcattcatgggttggtggtcgcaccttggtttgacttacacgggacatttgtgtttttggaggaaaagataccctgattctttgaatcttccttaagtttataaatatttattttttaaaag

SEQ ID NO: 6006 - protein, 970 aa, Homo sapiens
MLCFLDDGAGMDPSDAASVIQFGKSAKRTPESTQIGQYGNGLKSGSMRIGKDFILFTKKEDTMTCLFLSRTFHEEEGIDEVIVPLPTWNARTREPVTDNVEKFAIETELIYKYSPFRTEEEVMTQFMKIPGDSGTLVIIFNLKLMDNGEPELDIISNPRDIQMAETSPEGTKPERRSFRAYAAVLYIDPRMRIFIHGHKVQTKRLSCCLYKPRMYKYTSSRFKTRAEQEVKKAEHVARIAEEKAREAESKARTLEVRLGGDLTRDSRVMLRQVQNRAITLRREADVKKRIKEAKQRALKEPKELNFVFGVNIEHRDLDGMFIYNCSRLIKMYEKVGPQLEGGMACGGVVGVVDVPYLVLEPTHNKQDFADAKEYRHLLRAMGEHLAQYWKDIAIAQRGIIKFWDEFGYLSANWNQPPSSELRYKRRRAMEIPTTIQCDLCLKWRTLPFQLSSVEKDYPDTWVCSMNPDPEQDRCEASEQKQKVPLGTFRKDMKTQEEKQKQLTEKIRQQQEKLEALQKTTPIRSQADLKKLPLEVTTRPSTEEPVRRPQRPRSPPLPAVIRNAPSRPPSLPTPRPASQPRKAPVISSTPKLPALAAREEASTSRLLQPPEAPRKPANTLVKTASRPAPLVQQLSPSLLPNSKSPREVPSPKVIKTPVVKKTESPIKLSPATPSRKRSVAVSDEEEVEEEAERRKERCKRGRFVVKEEKKDSNELSDSAGEEDSADLKRAQKDKGLHVEVRVNREWYTGRVTAVEVGKHVVRWKVKFDYVPTDTTPRDRWVEKGSEDVRLMKPPSPEHQSLDTQQEGGEEEVGPVAQQAIAVAEPSTSECLRIEPDTTALSTNHETIDLLVQILRNCLRYFLPPSFPISKKQLSAMNSDELISFPLKEYFKQYEVGLQNLCNSYQSRADSRAKASEESLRTSERKLRETEEKLQKLRTNIVALLQKVQEDIDINTDDELDAYIEDLITKGD

SEQ ID NO: 6007 - DNA, 3129 bp, Homo sapiens
cagaatccaggggacggttgctgagcgggcctgggacagcgggtcgcggcacctccggcctgcgcgtgtctaatccgtctgtcgggtcccgaaagagctaagccgagcctgcgccggacgggtgggctggactgagagaattctctgagctggtgacaggtgccacaggcactggggatctcaccagaaaggaaccgacggagctaggggccagcgagatggcggacgaggccttagctgggctggatgagggagcccttcggaagctgctggaggtcacagcagatctggcagagcggcggcgcatccgctcagccatccgggaactgcagcggcaggagctggagcgcgaggaggaggccctggcatccaagcgtttccgtgccgagcggcaggacaacaaggagaactggctgcactctcagcagcgggaagctgagcagcgggctgccctggcacggctggcagggcagctggagtccatgaacgatgtggaggaattgactgcactgttgcgaagcgctggtgagtatgaggagcgcaagctgatccgagctgccatccgccgtgtacgggctcaggagattgaggctgccaccttggctgggaggttgtacagcgggcgtcccaacagtggctcaagagaggacagcaaggggctagcggcacacaggctggaacagtgtgaggtgccagagcgagaggaacaggaacagcaggcagaggtttcaaagccaacccccacccctgaaggcaccagccaggatgtgaccacagtgacactcctgctgcgagccccacctgggagcacatccagctcacctgcctcacccagcagttcacccacccctgcctctcctgagcctccattggagcctgccgaggcccagtgccttacagctgaggttccaggcagcccagagccaccccccagcccacccaagaccaccagccctgagcctcaggagtctccaacgctccccagcactgagggccaggtggtcaacaagcttctgtctggccccaaagagacccctgctgcccagagccccaccagaggcccctctgacaccaagagagcagacgtggctggaccccgaccctgccaacgctccctgtcggtgctcagcccccgccaaccagcccagaaccgagagtccaccccccttgccagcggaccttcctcattccagcgggctggctctgtgcgggatcgtgtccacaagttcacatctgattctcctatggctgctaggctccaggatggcacaccccaggctgccctaagtcccctgacccccgcaaggctcctgggcccctccctcaccagcaccacccctgcctcctcctccagcggctcctcctctcggggccccagtgatacctcctcccggttcagcaaggagcaacgaggagtagcccagcccctggcccagcttcgaagctgcccccaggaggagggccccagggggcggggcttggctgctaggccccttgaaaacagagcaggggggcctgtggcacgttcagaggagcctggtgccccgctgcccgtggccgtcggcactgccgagccagggggcagtatgaagaccacattcaccatcgagatcaaggacggccgtggccaggcctccacaggccgggtgctgctgcccacaggcaaccagagggcagaactgacactggggctgcgggcgcccccgaccctactcagcaccagtagtgggggcaagagcaccatcacccgtgtcaacagccctgggaccctggctcggctgggcagtgtcactcatgtcaccagcttcagccatgccccccccagtagccgaggaggctgcagcatcaagatggaagcagagccagcagagcctctcgctgcagcagtggaagcggccaatggggctgagcagacccgagtgaacaaagcaccagaagggcggagccctctgagcgctgaggagctgatgactattgaggatgaaggagtcttggacaagatgctggatcagagcacggactttgaagagcggaagctcatccgggctgcacttcgtgagctccgacaaaggaagagagaccagcgggacaaggagcgggaacggcggctgcaggaggcacggggccggccaggggaggggcgcggcaacacagccactgagaccaccacgaggcacagccagcgggcagctgatggctctgctgtcagcactgttaccaagactgagcggctcgtccactccaatgatggcacacggacggcccgcaccaccacagtggagtcgagtttcgtgaggcgctcggagaatggcagtggcagcaccatgatgcaaaccaagaccttctcctcttcctcctcatccaagaagatgggcagcatcttcgaccgcgaggaccaggccagcccacgggccggcagcctggcggcgctcgagaaacggcaggccgagaagaagaaagagctgatgaaggcgcagagtctgcccaagacctcagcctcccaggcgcgcaaggccatgattgagaagctggagaaggagggcgcggccggcagccctggcggaccccgcgcagccgtgcagcgatccaccagcttcggggtccccaacgccaacagcatcaagcagatgctgctggactggtgtcgagccaagactcgcggctacgagcacgtcgacatccagaacttctcctccagctggagtgatgggatggccttctgtgccctggtgcacaacttcttccctgaggccttcgactatgggcagcttagccctcagaaccgacgccagaacttcgaggtggccttctcatctgcggagatgctggtggactgtgtgcccctggtggaggtggacgacatgatgatcatgggcaagaagcctgaccccaagtgtgtcttcacctatgtgcagtcgctctacaaccacctgcgacgccacgaactgcgcctgcgcggcaagaatgtctagcctgcccgcccgcatggccagccagtggcaagctgccgcccccactctccgggcaccgtctcctgcctgtgcgtccgcccaccgctgccctgtctgttgcgacaccctcccccccacatacacacgcagcgttttgataaattattggttttcaacg

SEQ ID NO: 6008 - protein, 917 aa, Homo sapiens
MADEALAGLDEGALRKLLEVTADLAERRRIRSAIRELQRQELEREEEALASKRFRAERQDNKENWLHSQQREAEQRAALARLAGQLESMNDVEELTALLRSAGEYEERKLIRAAIRRVRAQEIEAATLAGRLYSGRPNSGSREDSKGLAAHRLEQCEVPEREEQEQQAEVSKPTPTPEGTSQDVTTVTLLLRAPPGSTSSSPASPSSSPTPASPEPPLEPAEAQCLTAEVPGSPEPPPSPPKTTSPEPQESPTLPSTEGQVVNKLLSGPKETPAAQSPTRGPSDTKRADVAGPRPCQRSLSVLSPRQPAQNRESTPLASGPSSFQRAGSVRDRVHKFTSDSPMAARLQDGTPQAALSPLTPARLLGPSLTSTTPASSSSGSSSRGPSDTSSRFSKEQRGVAQPLAQLRSCPQEEGPRGRGLAARPLENRAGGPVARSEEPGAPLPVAVGTAEPGGSMKTTFTIEIKDGRGQASTGRVLLPTGNQRAELTLGLRAPPTLLSTSSGGKSTITRVNSPGTLARLGSVTHVTSFSHAPPSSRGGCSIKMEAEPAEPLAAAVEAANGAEQTRVNKAPEGRSPLSAEELMTIEDEGVLDKMLDQSTDFEERKLIRAALRELRQRKRDQRDKERERRLQEARGRPGEGRGNTATETTTRHSQRAADGSAVSTVTKTERLVHSNDGTRTARTTTVESSFVRRSENGSGSTMMQTKTFSSSSSSKKMGSIFDREDQASPRAGSLAALEKRQAEKKKELMKAQSLPKTSASQARKAMIEKLEKEGAAGSPGGPRAAVQRSTSFGVPNANSIKQMLLDWCRAKTRGYEHVDIQNFSSSWSDGMAFCALVHNFFPEAFDYGQLSPQNRRQNFEVAFSSAEMLVDCVPLVEVDDMMIMGKKPDPKCVFTYVQSLYNHLRRHELRLRGKNV

SEQ ID NO: 6009 - DNA, 3294 bp, Homo sapiens
cagaatccaggggacggttgctgagcgggcctgggacagcgggtcgcggcacctccggcctgcgcgtgtctaatccgtctgtcgggtcccgaaagagctaagccgagcctgcgccggacgggtgggctggactgagagaattctctgagctggtgacaggtgccacaggcactggggatctcaccagaaaggaaccgacggagctaggggccagcgagatggcggacgaggccttagctgggctggatgagggagcccttcggaagctgctggaggtcacagcagatctggcagagcggcggcgcatccgctcagccatccgggaactgcagcggcaggagctggagcgcgaggaggaggccctggcatccaagcgtttccgtgccgagcggcaggacaacaaggagaactggctgcactctcagcagcgggaagctgagcagcgggctgccctggcacggctggcagggcagctggagtccatgaacgatgtggaggaattgactgcactgttgcgaagcgctggtgagtatgaggagcgcaagctgatccgagctgccatccgccgtgtacgggctcaggagattgaggctgccaccttggctgggaggttgtacagcgggcgtcccaacagtggctcaagagaggacagcaaggggctagcggcacacaggctggaacagtgtgaggtgccagagcgagaggaacaggaacagcaggcagaggtttcaaagccaacccccacccctgaaggcaccagccaggatgtgaccacagtgacactcctgctgcgagccccacctgggagcacatccagctcacctgcctcacccagcagttcacccacccctgcctctcctgagcctccattggagcctgccgaggcccagtgccttacagctgaggttccaggcagcccagagccaccccccagcccacccaagaccaccagccctgagcctcaggagtctccaacgctccccagcactgagggccaggtggtcaacaagcttctgtctggccccaaagagacccctgctgcccagagccccaccagaggcccctctgacaccaagagagcagacgtggctggaccccgaccctgccaacgctccctgtcggtgctcagcccccgccaaccagcccagaaccgagagtccaccccccttgccagcggaccttcctcattccagcgggctggctctgtgcgggatcgtgtccacaagttcacatctgattctcctatggctgctaggctccaggatggcacaccccaggctgccctaagtcccctgacccccgcaaggctcctgggcccctccctcaccagcaccacccctgcctcctcctccagcggctcctcctctcggggccccagtgatacctcctcccggttcagcaaggagcaacgaggagtagcccagcccctggcccagcttcgaagctgcccccaggaggagggccccagggggcggggcttggctgctaggccccttgaaaacagagcaggggggcctgtggcacgttcagaggagcctggtgccccgctgcccgtggccgtcggcactgccgagccagggggcagtatgaagaccacattcaccatcgagatcaaggacggccgtggccaggcctccacaggccgggtgctgctgcccacaggcaaccagagggcagaactgacactggggctgcgggcgcccccgaccctactcagcaccagtagtgggggcaagagcaccatcacccgtgtcaacagccctgggaccctggctcggctgggcagtgtcactcatgtcaccagcttcagccatgccccccccagtagccgaggaggctgcagcatcaagatggaagcagagccagcagagcctctcgctgcagcagtggaagcggccaatggggctgagcagacccgagtgaacaaagcaccagaagggcggagccctctgagcgctgaggagctgatgactattgaggatgaaggagtcttggacaagatgctggatcagagcacggactttgaagagcggaagctcatccgggctgcacttcgtgagctccgacaaaggaagagagaccagcgggacaaggagcgggaacggcggctgcaggaggcacggggccggccaggggaggggcgcggcaacacagccactgagaccaccacgaggcacagccagcgggcagctgatggctctgctgtcagcactgttaccaagactgagcggctcgtccactccaatgatggcacacggacggcccgcaccaccacagtggagtcgagtttcgtgaggcgctcggagaatggcagtggcagcaccatgatgcaaaccaagaccttctcctcttcctcctcatccaagaagatgggcagcatcttcgaccgcgaggaccaggccagcccacgggccggcagcctggcggcgctcgagaaacggcaggccgagaagaagaaagagctgatgaaggcgcagagtctgcccaagacctcagcctcccaggcgcgcaaggccatgattgagaagctggagaaggagggcgcggccggcagccctggcggaccccgcgcagccgtgcagcgatccaccagcttcggggtccccaacgccaacagcatcaagcagatgctgctggactggtgtcgagccaagactcgcggctacgagcacgtcgacatccagaacttctcctccagctggagtgatgggatggccttctgtgccctggtgcacaacttcttccctgaggccttcgactatgggcagcttagccctcagaaccgacgccagaacttcgaggtggccttctcatctgcggagacccatgcggactgcccgcagctcctggatacagaggacatggtgcggcttcgagagcctgactggaagtgcgtgtacacgtacatccaggaattctaccgctgtctggtccagaaggggctggtaaaaaccaaaaagtcctaacccctgctcggggccccacggatgctggtggactgtgtgcccctggtggaggtggacgacatgatgatcatgggcaagaagcctgaccccaagtgtgtcttcacctatgtgcagtcgctctacaaccacctgcgacgccacgaactgcgcctgcgcggcaagaatgtctagcctgcccgcccgcatggccagccagtggcaagctgccgcccccactctccgggcaccgtctcctgcctgtgcgtccgcccaccgctgccctgtctgttgcgacaccctcccccccacatacacacgcagcgttttgataaattattggttttcaacg

SEQ ID NO: 6010 - protein, 915 aa, Homo sapiens
MADEALAGLDEGALRKLLEVTADLAERRRIRSAIRELQRQELEREEEALASKRFRAERQDNKENWLHSQQREAEQRAALARLAGQLESMNDVEELTALLRSAGEYEERKLIRAAIRRVRAQEIEAATLAGRLYSGRPNSGSREDSKGLAAHRLEQCEVPEREEQEQQAEVSKPTPTPEGTSQDVTTVTLLLRAPPGSTSSSPASPSSSPTPASPEPPLEPAEAQCLTAEVPGSPEPPPSPPKTTSPEPQESPTLPSTEGQVVNKLLSGPKETPAAQSPTRGPSDTKRADVAGPRPCQRSLSVLSPRQPAQNRESTPLASGPSSFQRAGSVRDRVHKFTSDSPMAARLQDGTPQAALSPLTPARLLGPSLTSTTPASSSSGSSSRGPSDTSSRFSKEQRGVAQPLAQLRSCPQEEGPRGRGLAARPLENRAGGPVARSEEPGAPLPVAVGTAEPGGSMKTTFTIEIKDGRGQASTGRVLLPTGNQRAELTLGLRAPPTLLSTSSGGKSTITRVNSPGTLARLGSVTHVTSFSHAPPSSRGGCSIKMEAEPAEPLAAAVEAANGAEQTRVNKAPEGRSPLSAEELMTIEDEGVLDKMLDQSTDFEERKLIRAALRELRQRKRDQRDKERERRLQEARGRPGEGRGNTATETTTRHSQRAADGSAVSTVTKTERLVHSNDGTRTARTTTVESSFVRRSENGSGSTMMQTKTFSSSSSSKKMGSIFDREDQASPRAGSLAALEKRQAEKKKELMKAQSLPKTSASQARKAMIEKLEKEGAAGSPGGPRAAVQRSTSFGVPNANSIKQMLLDWCRAKTRGYEHVDIQNFSSSWSDGMAFCALVHNFFPEAFDYGQLSPQNRRQNFEVAFSSAETHADCPQLLDTEDMVRLREPDWKCVYTYIQEFYRCLVQKGLVKTKKS

SEQ ID NO: 6011 - DNA, 1383 bp, Homo sapiens
gcggtggcagtttgccgcgggtgtgtgaagggagacagtgtggaggccacagggtactcgccacgatgagcagcaccttagctaagatcgcggagatagaagcagagatggctcggactcaaaagaacaaggccacagcacaccacttagggctgcttaaggctcgtcttgctaagcttcgtcgagaactcattactccaaagggtggtggtggtggaggtccaggagaaggttttgatgtggccaagacaggtgatgctcgaattggatttgttggttttccatctgtggggaagtcaacactgcttagtaacctggcaggggtatattctgaggtggcagcctatgaattcactactctgaccactgtgcctggtgtcatcagatacaaaggtgccaagatccagctcctggatctcccaggtatcattgaaggtgccaaggatgggaaaggtagaggtcgtcaagtcattgcagtggcccgaacctgtaacttgatcttgattgttctggatgtcctgaaacctttgggacataagaagataattgaaaatgagctggaaggctttggcattcgcttgaacagcaaaccccccaacattggctttaagaagaaggacaagggaggcattaatctcacagccacttgcccccagagtgagctggatgctgaaactgtgaagagcattctggctgaatacaagattcataatgccgatgtgactctacgtagtgatgctacagctgatgacctcattgatgtggtggaaggaaacagagtttatatcccctgtatctatgtgttaaataagattgaccaaatctccattgaggaattggatatcatctataaggtgcctcactgtgtacccatctctgcccatcaccgctggaattttgatgacctattggaaaagatctgggactatctgaaactagtgagaatttacaccaaacccaaaggccagttaccagattacacatccccagtggtgcttccttactccaggaccacagtggaggatttctgcatgaagattcacaaaaatcttatcaaagaatttaaatatgctctggtctggggtctctctgtgaaacacaatcctcagaaagtgggtaaagaccatacgttggaggatgaggatgtcattcaaattgtgaagaagtgaaacctttcccttttcccatctgccggacgaaccacaacagcgttccccatgatcaagcaccctaccccagttctttctggttttggcagtcactggatcaggatccaggggagggagatggaggcacccaaactggaacttcatttgtcttaccttggtgtcaccttgtatgtcgaactgcataaaagatctggtaggctggtcagctacatgc

SEQ ID NO: 6012 - protein, 367 aa, Homo sapiens
MSSTLAKIAEIEAEMARTQKNKATAHHLGLLKARLAKLRRELITPKGGGGGGPGEGFDVAKTGDARIGFVGFPSVGKSTLLSNLAGVYSEVAAYEFTTLTTVPGVIRYKGAKIQLLDLPGIIEGAKDGKGRGRQVIAVARTCNLILIVLDVLKPLGHKKIIENELEGFGIRLNSKPPNIGFKKKDKGGINLTATCPQSELDAETVKSILAEYKIHNADVTLRSDATADDLIDVVEGNRVYIPCIYVLNKIDQISIEELDIIYKVPHCVPISAHHRWNFDDLLEKIWDYLKLVRIYTKPKGQLPDYTSPVVLPYSRTTVEDFCMKIHKNLIKEFKYALVWGLSVKHNPQKVGKDHTLEDEDVIQIVKK

SEQ ID NO: 6013 - DNA, 655 bp, Homo sapiens
gtgagcggagccggcgccccggccctgccgggagccccaggtgacttctcagggaggcgccccaccctgcccgctcagagggccagtgccgggtgggggtgcccttctagggccttcggtcgcaggtgggctctcccagctgtgacgacgcggccccggcctgaggagccccgcggacaaggttgagcgagtcgtgggctttttttccgtccccacgtgggcacggcccgggctgcgtgagctcacttcctccacatcttatctcctgccgggcgcgggcgcttcccatcagacagcaggagccagttctcagggtccttggctgaacacacaagctgcaaagctacatatactccggcagagctggctgcgggctgcagactgcagggccggtcactccgcgcaagtttgggttcctgttttagaactgccacctaagcccctcttatttcatctttcctgtggtggaaacccctgcccccaccggagtgtgaggttgactttttggaaagagagccctgaccctctattctgcaccctgtgagccaccgagactgaaccaaacccaggaagcggcgccaccaaccagcctcgcagaggcagaggccctggagcagtgacagcacaggagatctgctggctcgggggaagggga

SEQ ID NO: 6014 - DNA, 480 bp, Homo sapiens
ctcttttaccaaggacccgccaacatgtgccgcgtttgcaccaaaaccgtgaagaaggcggcccgggtcatcatagaaaagtactacacacgcctgggcaacgacttccacacgaacaagcgcgtgtgcaaggagatcgccattatccccagcaagaagctccgcaacaagatagcaggctatgtcacgcatctgatgaaatggattcagagaggcccagtaagaggtatctccatcaagctgcaggaggaggagagagaaaggagagacaattatgttcctgaggtctcagccttggatcaggagataattgaagtagatcctgacactaaggaaatgctgaagcttttggacttcggcagtctgtccaacctgcaggtcactcagcctacagttgggatgaacttcaaaatgcctcggggacctgtttgaattttttctgcagtgctgtattattttcaataaatctggcacaacagc

SEQ ID NO: 6015 - DNA, 2005 bp, Homo sapiens
gctctgagaagccggactacgcggcagcggctcttcaaagcggagccgggagtttttgctacagttttcgccaccatgagtcgcagctataatgatgagctgcagttcttggagaagatcaataaaaactgctggaggatcaagaagggcttcgtgcccaacatgcaggttgaaggtgttttctatgtgaatgatgctctggagaaattgatgtttgaggaattaaggaatgcctgtcgaggtggtggtgttggtggcttcctgccagccatgaaacagattggcaatgtggcagccctgcctggaattgttcatcgatctattgggcttcctgatgtccattcaggatatgggtttgctattgggaacatggcagcctttgatatgaatgaccctgaagcagtagtatccccaggtggtgtcgggtttgacatcaactgtggtgtccgcttgctaagaaccaatttagatgaaagtgatgtccagcctgtgaaggagcaacttgcccaagctatgtttgaccacattcctgttggggtggggtcaaaaggtgtcatcccaatgaatgccaaagacttggaggaggccttggagatgggggtggactggtccttaagagaagggtatgcctgggctgaagacaaggagcactgcgaggagtacggaaggatgctgcaggctgaccccaataaagtttctgcaagggcgaagaaaagaggccttcctcagttggggaccctgggagcaggcaaccattatgcagaaatccaggttgtggatgagattttcaatgagtatgctgctaaaaaaatgggcatcgaccataagggacaggtgtgtgtgatgatccacagtggaagcagaggcttgggccaccaagtagccacagatgcgctggtagctatggagaaggccatgaagagagacaagattatagtcaatgatcggcagttggcttgtgctcgaatcgcttccccagagggtcaagactatctgaagggaatggcagctgctgggaactatgcctgggtcaaccgctcttccatgaccttcttaacccgtcaggctttcgccaaggtcttcaacacaacccctgatgacttggacctacatgtgatctatgatgtttctcacaacattgccaaagtggagcagcatgtggtggacggaaaggaacggacactgttagtacacaggaagggatccacccgcgctttccctcctcaccatcccctcattgctgttgattaccaactcactggacagccagtgctcattggtggcaccatgggaacctgtagttatgttcttactggcactgaacagggcatgactgagacctttggaacaacctgtcatggagcgggccgtgcattgtcccgagcaaaatctcgacgtaatttagatttccaggatgtcttagacaaattggcagatatgggaattgcgatccgtgttgcctcacccaaactggttatggaagaggctcctgagtcctataagaatgtgacagatgtggtaaatacctgccatgatgctggaatcagcaagaaagccattaaactgagaccaattgctgtgatcaaaggatagaaccttggacagcagggctgcctgacaccaccaaccctctctgaagtggaagtggactgacatgctcttctgacatcagactcaaggcgggacaagttgcaaagtgtgcagctgtaactgctcacgccaaaatggctgatggggaggctgctgctttcaggggcccgtgcttgtaaaataaccttccaggaagaggcacattgcccacctttggaaagggaggaatatgccttctccttggttgttccacagagttttaggaaaatctgttagggatgggtagatgtcaaactgccttacgcagtcatactgatctttagccatcagattgatcttcttcacaccaagctctgtttacattccgagaggtgtcatgaagaaagttctgttcaataaggttttggaatgtttc

SEQ ID NO: 6016 - protein, 505 aa, Homo sapiens
MSRSYNDELQFLEKINKNCWRIKKGFVPNMQVEGVFYVNDALEKLMFEELRNACRGGGVGGFLPAMKQIGNVAALPGIVHRSIGLPDVHSGYGFAIGNMAAFDMNDPEAVVSPGGVGFDINCGVRLLRTNLDESDVQPVKEQLAQAMFDHIPVGVGSKGVIPMNAKDLEEALEMGVDWSLREGYAWAEDKEHCEEYGRMLQADPNKVSARAKKRGLPQLGTLGAGNHYAEIQVVDEIFNEYAAKKMGIDHKGQVCVMIHSGSRGLGHQVATDALVAMEKAMKRDKIIVNDRQLACARIASPEGQDYLKGMAAAGNYAWVNRSSMTFLTRQAFAKVFNTTPDDLDLHVIYDVSHNIAKVEQHVVDGKERTLLVHRKGSTRAFPPHHPLIAVDYQLTGQPVLIGGTMGTCSYVLTGTEQGMTETFGTTCHGAGRALSRAKSRRNLDFQDVLDKLADMGIAIRVASPKLVMEEAPESYKNVTDVVNTCHDAGISKKAIKLRPIAVIKG

SEQ ID NO: 6017 - DNA, 2165 bp, Homo sapiens
ccccgagaggcccggttcctttaggccgcctgcccgcctccagctctcggggtcggctctaggaggcgccctcaggagaggggcgggcgctctattccagagaccgagtggcagggcggccactgtggcggggctctttccccgtttcgcctcagctacccctcagctccggtagtcgccagtccggggtcgtcgccgtttggggcgggagctgctcggccccgccgccgtccccgtcgccgcttccgggtccaggcccctcgggccgcctgccgccgtcatgaggctgcgggtgcggcttctgaagcggacctggccgctggaggtgcccgagacggagccgacgctggggcatttgcgctcgcacctgaggcagtccctgctgtgcacctgggggtacagttctaatacccgatttacaattacattgaactacaaggatcccctcactggagatgaagagaccttggcttcatatgggattgtttctggggacttgatatgtttgattcttcaagatgacattccagcgcctaatataccttcatccacagattcagagcattcttcactccagaataatgagcaaccctctttggccaccagctccaatcagactagcatacaggatgaacaaccaagtgattcattccaaggacaggcagcccagtctggtgtttggaatgacgacagtatgttagggcctagtcaaaattttgaagctgagtcaattcaagataatgcgcatatggcagagggcacaggtttctatccctcagaacccatgctctgtagtgaatcggtggaagggcaagtgccacattcattagagaccttgtatcaatcagctgactgttctgatgccaatgatgccttgatagtgttgatacatcttctcatgttggagtcaggttacatacctcagggcaccgaagccaaagcactgtccatgccggagaagtggaagttgagcggggtgtataagctgcagtacatgcatcctctctgcgagggcagctccgctactctcacctgtgtgcctttgggaaacctgattgttgtaaatgctacactaaaaatcaacaatgagattagaagtgtgaaaagattgcagctgctaccagaatcttttatttgcaaagagaaactaggggaaaatgtagccaacatatacaaagatcttcagaaactctctcgcctctttaaagaccagctggtgtatcctcttttggcttttacccgacaagcactgaacctaccagatgtatttgggttggtcgtcctcccattggaactgaaactacggatcttccgacttctggatgttcgttccgtcttgtctttgtctgcggtttgtcgtgacctctttactgcttcaaatgacccactcctgtggaggtttttatatctgcgtgattttcgagacaatactgtcagagttcaagacacagattggaaagaactgtacaggaagaggcacatacaaagaaaagaatccccgaaagggcggtttgtgatgctcctgccatcgtcaactcacaccattccattctatcccaaccccttgcaccctaggccatttcctagctcccgccttcctccaggaattatcgggggtgaatatgaccaaagaccaacacttccctatgttggagacccaatcagttcactcattcctggtcctggggagacgcccagccagtttcctccactgagaccacgctttgatccagttggcccacttccaggacctaaccccatcttgccagggcgaggcggccccaatgacagatttccctttagacccagcaggggtcggccaactgatggccggctgtcattcatgtgattgatttgtaatttcatttctggagctccatttgtttttgtttctaaactacagatgtcaactccttggggtgctgatctcgagtgttattttctgattgtggtgttgagagttgcactcccagaaaccttttaagagatacatttatagccctaggggtggtatgacccaaaggttcctctgtgacaaggttggccttgggaatagttggctgccaatctccctgctcttggttctcctctagattgaagtttgttttctgatgctgttcttaccagattaaaaaaaagtgtaaattaaaaaaaaaaaaaaaaaa

SEQ ID NO: 6018 - protein, 522 aa, Homo sapiens
MRLRVRLLKRTWPLEVPETEPTLGHLRSHLRQSLLCTWGYSSNTRFTITLNYKDPLTGDEETLASYGIVSGDLICLILQDDIPAPNIPSSTDSEHSSLQNNEQPSLATSSNQTSIQDEQPSDSFQGQAAQSGVWNDDSMLGPSQNFEAESIQDNAHMAEGTGFYPSEPMLCSESVEGQVPHSLETLYQSADCSDANDALIVLIHLLMLESGYIPQGTEAKALSMPEKWKLSGVYKLQYMHPLCEGSSATLTCVPLGNLIVVNATLKINNEIRSVKRLQLLPESFICKEKLGENVANIYKDLQKLSRLFKDQLVYPLLAFTRQALNLPDVFGLVVLPLELKLRIFRLLDVRSVLSLSAVCRDLFTASNDPLLWRFLYLRDFRDNTVRVQDTDWKELYRKRHIQRKESPKGRFVMLLPSSTHTIPFYPNPLHPRPFPSSRLPPGIIGGEYDQRPTLPYVGDPISSLIPGPGETPSQFPPLRPRFDPVGPLPGPNPILPGRGGPNDRFPFRPSRGRPTDGRLSFM

SEQ ID NO: 6019 - DNA, 5479 bp, Homo sapiens
cttgccccagagctgatccttgtctttgtccacttctcagcgaggatggcacttcagggagcccttcccttactatcgcagagagagcaggccctccccagtcatgtccaacccagaactctgttttgttttcttcatagccctagcatcacagaaaatcaccctgtgcattcatggatgtccacgggggcaagggctttgtgttgcttaacccagcatcctgaaccgtgtttgttgaatgaatacagaaccccgtttgctctgggagagcacagaaaacagtcttctatcatatatcatagccagctgcaaacagcagatggcttcccatatcccagagagtaagaaccagagagagagagaaagagagagagtttgggtctttctcctctgtgcctgctctctccagagaaactggaggggtagcagttagcattcccccgctggttccaccaagcacagtcaaggtctctaggacatggccacccctcacctgtggaagcggtcctgctggggtgggtgggtgttagttggttctggtttgggtcagagacacccagtggcccaggtgggcgtggggccagggcgcagacgagaaggggcacgagggctccgctccgaggacccagcggcaagcaccggtcccgggcgcgccccagcccacccactcgcgtgcccacggcggcattattccctataaggatctgaacgatccgggggcggccccgccccgttaccccttgcccccggccccgccccctttttggagggccgatgaggtaatgcggctctgccattggtctgagggggcgggccccaacagcccgaggcggggtccccgggggcccagcgctatatcactcggccgcccaggcagcggcgcagagcgggcagcaggcaggcggcgggcgctcagacggcttctcctcctcctcttgctcctccagctcctgctccttcgccgggaggccgcccgccgagtcctgcgccagcgccgaggcagcctcgctgcgccccatcccgtcccgccgggcactcggagggcagcgcgccggaggccaaggttgccccgcacggcccggcgggcgagcgagctcgggctgcagcagccccgccggcggcgcgcacggcaactttggagaggcgagcagcagccccggcagcggcggcagcagcggcaatgaccccttggctcgggctcatcgtgctcctgggcagctggagcctgggggactggggcgccgaggcgtgcacatgctcgcccagccacccccaggacgccttctgcaactccgacatcgtgatccgggccaaggtggtggggaagaagctggtaaaggaggggcccttcggcacgctggtctacaccatcaagcagatgaagatgtaccgaggcttcaccaagatgccccatgtgcagtacatccatacggaagcttccgagagtctctgtggccttaagctggaggtcaacaagtaccagtacctgctgacaggtcgcgtctatgatggcaagatgtacacggggctgtgcaacttcgtggagaggtgggaccagctcaccctctcccagcgcaaggggctgaactatcggtatcacctgggttgtaactgcaagatcaagtcctgctactacctgccttgctttgtgacttccaagaacgagtgtctctggaccgacatgctctccaatttcggttaccctggctaccagtccaaacactacgcctgcatccggcagaagggcggctactgcagctggtaccgaggatgggcccccccggataaaagcatcatcaatgccacagacccctgagcgccagaccctgccccacctcacttccctcccttcccgctgagcttcccttggacactaactcttcccagatgatgacaatgaaattagtgcctgttttcttgcaaatttagcacttggaacatttaaagaaaggtctatgctgtcatatggggtttattgggaactatcctcctggccccaccctgccccttctttttggttttgacatcattcatttccacctgggaatttctggtgccatgccagaaagaatgaggaacctgtattcctcttcttcgtgataatataatctctatttttttaggaaaacaaaaatgaaaaactactccatttgaggattgtaattcccacccctcttgcttcttccccacctcaccatctcccagaccctcttccctttgcccttctcctccaatacataaaggacacagacaaggaacttgctgaaaggccaaccatttcaggatcagtcaaaggcagcaagcagatagactcaaggtgtgtgaaagatgttatacaccaggagctgccactgcatgtcccaaccagactgtgtctgtctgtgtctgcatgtaagagtgagggagggaaggaaggaactacaagagagtcggagatgatgcagcacacacacaattccccagcccagtgatgcttgtgttgaccagatgttcctgagtctggagcaagcacccaggccagaataacagagctttcttagttggtgaagacttaaacatctgcctgaggtcaggaggcaatttgcctgccttgtacaaaagctcaggtgaaagactgagatgaatgtctttcctctccctgcctcccaccagacttcctcctggaaaacgctttggtagatttggccaggagctttcttttatgtaaattggataaatacacacaccatacactatccacagatatagccaagtagatttgggtagaggatactatttccagaatagtgtttagctcacctagggggatatgtttgtatacacatttgcatatacccacatggggacataagctaatttttttacaggacacagaattctgttcaatgctgttaaatatgccaatagtttaatctcttctattttgttgtcgttgcttgtttgaagaaaatcatgacattccaagttgacatttttttttcattttaattaaaatttgaaattctgaacaccgtcagcaccctctcttccctatcatgggtcatctgacccctgtccgtctccttgtccctgcttcatgtttgggggcctttctttaactgccttcctggcttagctcagatggcagatgagagtgtagtcaagggcctgggcacaggagggagagctgcagagtgtcctgcctgccttggctggagggacacctctcctgggtgtggagacagcttggttccctttccctagctccctggtgggtgaatgccacctcctgagatcctcacctcttggaattaaaattgttggtcactggggaaagcctgagtttgcaaccagttgtagggtttctgttgtgtttttttttttttttttgaaataaaactataatataaattctcctattaaataaaattattttaagttttagtgtcaaaagtgagatgctgagagtaggtgataatgtatattttacagagtgggggttggcaggatggtgacattgaacatgattgctctctgtctcttttttcagcttatgggtatttatcttctattagtatttgtatcttcagttcattccactttaggaaacagagctgccaattgaaacagaagaagaaaaaaaaaaaaagcagcagacaacacactgtagagtcttgcacacacacaagtgcccaggcaaggtgcttggcagaaccgcagagtgggaagagagtaccggcatcgggtttccttgggatcaatttcattaccgtgtacctttcccattgtggtcatgccatttggcagggggagaatgggaggcttggccttctttgtgaggcagtgtgagcagaagctgatgccagcatgtcactggttttgaagggatgagcccagacttgatgttttgggattgtccttattttaacctcaaggtctcgcatggtggggcccctgaccaacctacacaagttccctcccacaagtggacatcagtgtcttctctgtgaggcatctggccattcgcactccctggtgtggtcagcctctctcacacaaggaggaacttgggtgaaggctgagtgtgaggcacctgaagtttccctgcggagtcgataaattagcagaaccacatccccatctgttaggccttggtgaggaggccctgggcaaagaagggtctttcgcaaagcgatgtcagagggcggttttgagctttctataagctatagctttgtttatttcacccgttcacttactgtataatttaaaatcatttatgtagctgagacacttctgtatttcaatcatatcatgaacattttattttgctaaatcttgtgtcatgtgtaggctgtaatatgtgtacattgtgtttaagagaaaaatgaaacccacatgccgccattttcctgaatcaaattctgcagtggaatggagaggaaaatacttctaggcaagcagctagactggtgaattgggggaaatagaaggaactagtaactgagactcctccagcctcctccctattggaatcccaatggctcctggagtaggaaaaaagtttaaactacattcatgttcttgttctgtgtcactcggccctgggtagtctaccatttacttcaccccaagtcctgctgcccatccagttgggaagccatgattttcctaagaatccagggccatgggagatacaattccaagttctcgcttcctcctttgggcatctcttctgcctcccaatcaaggaagctccatgctcaggctctcagctctcgggccagtgctctgctctgtccagggtaggtaatactgggagactcctgtcttttaccctcccctcgttccagacctgcctcatggtggcaacatggttcttgaacaattaaagaaacaaatgactttttggaatagccctgtctagggcaaactgtggcccccaggagacactacccttccatgccccagacctctgtcttgcatgtgacaattgacaatctggactaccccaagatggcacccaagtgtttggcttctggctacctaaggttaacatgtcactagagtatttttatgagagacaaacattataaaaatctgatggcaaaagcaaaacaaaatggaaagtaggggaggtggatgtgacaacaacttccaaattggctctttggaggcgagaggaaggggagaacttggagaatagtttttgctttgggggtagaggcttcttagattctcccagcatccgcctttccctttagccagtctgctgtcctgaaacccagaagtgatggagagaaaccaacaagagatctcgaaccctgtctagaaggaatgtatttgttgctaaatttcgtagcactgtttacagttttcctccatgttatttatgaattttatattccgtgaatgtatattgtcttgtaatgttgcataatgttcactttttatagtgtgtcctttattctaaacagtaaagtggttttatttctatcac

SEQ ID NO: 6020 - DNA, 1550 bp, Homo sapiens
tcaacgcctgcctcccctcgagcgtcctcagcgcagccgccgcccgcggagccagcacgaacgagcccagcaccggccggatggagcgtccgcaacccgacagcatgccccaggatttgtcagaggccctgaaggaggccaccaaggaggtgcacacccaggcagagaatgctgagttcatgaggaactttcagaagggccaggtgacccgagacggcttcaagctggtgatggcctccctgtaccacatctatgtggccctggaggaggagattgagcgcaacaaggagagcccagtcttcgcccctgtctacttcccagaagagctgcaccgcaaggctgccctggagcaggacctggccttctggtacgggccccgctggcaggaggtcatcccctacacaccagccatgcagcgctatgtgaagcggctccacgaggtggggcgcacagagcccgagctgctggtggcccacgcctacacccgctacctgggtgacctgtctgggggccaggtgctcaaaaagattgcccagaaagccctggacctgcccagctctggcgagggcctggccttcttcaccttccccaacattgccagtgccaccaagttcaagcagctctaccgctcccgcatgaactccctggagatgactcccgcagtcaggcagagggtgatagaagaggccaagactgcgttcctgctcaacatccagctctttgaggagttgcaggagctgctgacccatgacaccaaggaccagagcccctcacgggcaccagggcttcgccagcgggccagcaacaaagtgcaagattctgcccccgtggagactcccagagggaagcccccactcaacacccgctcccaggctccgcttctccgatgggtccttacactcagctttctggtggcgacagttgctgtagggctttatgccatgtgaatgcaggcatgctggctcccagggccatgaactttgtccggtggaaggccttctttctagagagggaattctcttggctggcttccttaccgtgggcactgaaggctttcagggcctccagccctctcactgtgtccctctctctggaaaggaggaaggagcctatggcatcttccccaacgaaaagcacatccaggcaatggcctaaacttcagagggggcgaaggggtcagccctgcccttcagcatcctcagttcctgcagcagagcctggaagacaccctaatgtggcagctgtctcaaacctccaaaagccctgagtttcaagtatccttgttgacacggccatgaccactttccccgtgggccatggcaatttttacacaaacctgaaaagatgttgtgtcttgtgtttttgtcttatttttgttggagccactctgttcctggctcagcctcaaatgcagtatttttgttgtgttctgttgtttttatagcagggttggggtggtttttgagccatgcgtgggtggggagggaggtgtttaacggcactgtggccttggtctaacttttgtgtgaaataataaacaacattgtctg

SEQ ID NO: 6021 - protein, 288 aa, Homo sapiens
MERPQPDSMPQDLSEALKEATKEVHTQAENAEFMRNFQKGQVTRDGFKLVMASLYHIYVALEEEIERNKESPVFAPVYFPEELHRKAALEQDLAFWYGPRWQEVIPYTPAMQRYVKRLHEVGRTEPELLVAHAYTRYLGDLSGGQVLKKIAQKALDLPSSGEGLAFFTFPNIASATKFKQLYRSRMNSLEMTPAVRQRVIEEAKTAFLLNIQLFEELQELLTHDTKDQSPSRAPGLRQRASNKVQDSAPVETPRGKPPLNTRSQAPLLRWVLTLSFLVATVAVGLYAM

SEQ ID NO: 6022 - DNA, 2533 bp, Homo sapiens
ttttcccgcgaaactcggcggctgagcgtggaggttcttgtctcccctggtttgtgaagtgcggaaaaccagaggcgcagtcatgtcgggattcgacgatcctggcattttctacagcgacagcttcgggggcgacgcccaggccgacgaggggcaggcccgcaaatcgcagctgcagaggcgcttcaaggagttcctgcggcagtaccgagtgggcaccgaccgcacgggcttcaccttcaaatacagggatgaactcaagcggcattacaacctgggggagtactggattgaggtggagatggaggatctggccagctttgatgaggacctggccgactacttgtacaagcagccagccgagcacctgcagctgctggaggaagctgccaaggaggtagctgatgaggtgacccggccccggccttctggggaggaggtgctccaggacatccaggtcatgctcaagtcggacgccagcccttccagcattcgtagcctgaagtcggacatgatgtcacacctggtgaagatccctggcatcatcatcgcggcctctgcggtccgtgccaaggccacccgcatctctatccagtgccgcagctgccgcaacaccctcaccaacattgccatgcgccctggcctcgagggctatgccctgcccaggaagtgcaacacagatcaggctgggcgccccaaatgcccattggacccgtacttcatcatgcccgacaaatgcaaatgcgtggacttccagaccctgaagctgcaggagctgcctgatgcagtcccccacggggagatgcccagacacatgcagctctactgcgacaggtacctgtgtgacaaggtcgtccctgggaacagggttaccatcatgggcatctactccatcaagaagtttggcctgactaccagcaggggccgtgacagggtgggcgtgggcatccgaagctcctacatccgtgtcctgggcatccaggtggacacagatggctctggccgcagctttgctggggccgtgagcccccaggaggaggaggagttccgtcgcctggctgccctcccaaatgtctatgaggtcatctccaagagcatcgccccctccatctttgggggcacagacatgaagaaggccattgcctgcctgctctttgggggctcccgaaagaggctccctgatggacttactcgccgaggagacatcaacctgctgatgctaggggaccctgggacagccaagtcccagcttctgaagtttgtggagaagtgttctcccattggggtatacacgtctgggaaaggcagcagcgcagctggactgacagcctcggtgatgagggacccttcgtcccggaatttcatcatggagggcggagccatggtcctggccgatggtggggtcgtctgtattgacgagtttgacaagatgcgagaagatgaccgtgtggcaatccacgaagccatggagcagcagaccatctctatcgccaaggctgggatcaccaccaccctgaactcccgctgctccgtcctggctgctgccaactcagtgttcggccgctgggatgagacgaagggggaggacaacattgacttcatgcccaccatcttgtcgcgcttcgacatgatcttcatcgtcaaggatgagcacaatgaggagagggatgtgatgctggccaagcatgtcatcactctgcacgtgagcgcactgacacagacacaggctgtggagggcgagattgacctggccaagctgaagaagtttattgcctactgccgagtgaagtgtggcccccggctgtcagcagaggctgcagagaaactgaagaaccgctacatcatcatgcggagcggggcccgtcagcacgagagggacagtgaccgccgctccagcatccccatcactgtgcggcagctggaggccattgtgcgcatcgcggaagccctcagcaagatgaagctgcagcccttcgccacagaggcagatgtggaggaggccctgcggctcttccaagtgtccacgttggatgctgccttgtccggtaccctgtcaggggtggagggcttcaccagccaggaggaccaggagatgctgagccgcatcgagaagcagctcaagcgccgctttgccattggctcccaggtgtctgagcacagcatcatcaaggacttcaccaaacagaaatacccggagcacgccatccacaaggtgctgcagctcatgctgcggcgcggcgagatccagcatcgcatgcagcgcaaggttctctaccgcctcaagtgagtcgcgccgcctcactggactcatggactcgcccacgcctcgcccctcctgccgctgcctgccattgacaatgttgctgggacctctgcctccccactgcagccctcgaacttcccaggcaccctcctttctgccccagaggaaggagctgtagtgtcctgctgcctctgggcgcccgcctctagcgcggttctgggaagtgtgcttttggcatccgttaataataaagccacggtgtgttcaggt

SEQ ID NO: 6023 - protein, 734 aa, Homo sapiens
MSGFDDPGIFYSDSFGGDAQADEGQARKSQLQRRFKEFLRQYRVGTDRTGFTFKYRDELKRHYNLGEYWIEVEMEDLASFDEDLADYLYKQPAEHLQLLEEAAKEVADEVTRPRPSGEEVLQDIQVMLKSDASPSSIRSLKSDMMSHLVKIPGIIIAASAVRAKATRISIQCRSCRNTLTNIAMRPGLEGYALPRKCNTDQAGRPKCPLDPYFIMPDKCKCVDFQTLKLQELPDAVPHGEMPRHMQLYCDRYLCDKVVPGNRVTIMGIYSIKKFGLTTSRGRDRVGVGIRSSYIRVLGIQVDTDGSGRSFAGAVSPQEEEEFRRLAALPNVYEVISKSIAPSIFGGTDMKKAIACLLFGGSRKRLPDGLTRRGDINLLMLGDPGTAKSQLLKFVEKCSPIGVYTSGKGSSAAGLTASVMRDPSSRNFIMEGGAMVLADGGVVCIDEFDKMREDDRVAIHEAMEQQTISIAKAGITTTLNSRCSVLAAANSVFGRWDETKGEDNIDFMPTILSRFDMIFIVKDEHNEERDVMLAKHVITLHVSALTQTQAVEGEIDLAKLKKFIAYCRVKCGPRLSAEAAEKLKNRYIIMRSGARQHERDSDRRSSIPITVRQLEAIVRIAEALSKMKLQPFATEADVEEALRLFQVSTLDAALSGTLSGVEGFTSQEDQEMLSRIEKQLKRRFAIGSQVSEHSIIKDFTKQKYPEHAIHKVLQLMLRRGEIQHRMQRKVLYRLK

SEQ ID NO: 6024 - DNA, 3225 bp, Homo sapiens
gaggtgctggggagcagcgtgtttgctgtgcttgattgtgagctgctgggaagttgtgactttcattttacctttcgaattcctgggtatatcttgggggctggaggacgtgtctggttattatataggtgcacagctggaggtgagatccacacagctcagaccagctggatcttgctcagtctctgtcagaggaagatcccttggaggaggccccgcagcgacatggagggagctgctttgctgaaaatctttgtcgtctgcatctgggtgcagcaaaaccatccaggctggacagtggctggacagttccaagaaaagaaacgcttcactgaagaagtcattgaatacttccagaagaaagttagcccagtgcatctgaaaatcctgctgactagcgatgaagcctggaagagatttgtgcgtgtggctgaattgcccagggaagaggcagatgctctctatgaagctctgaagaatcttacaccatatgtggctattgaggacaaagacatgcagcaaaaagaacagcagtttagggagtggtttttgaaagtttcctcaaatcagatggaagattcaggagtccatagaaaggcttcgtgtcattgcaaatgagattgaaaaggtccacagaggctgcgtcatcgccaatgtggtgtctggctccactggcatcctgtctgtcattggcgttatgttggcaccatttacagcagggctgagcctgagcattactgcagctggggtagggctgggaatagcatctgccacggctgggatcgcctccagcatcgtggagaacacatacacaaggtcagcagaactcacagccagcaggctgactgcaaccagcactgaccaattggaggcattaagggacattctgcgtgacatcacacccaatgtgctttcttttgcacttgattttgacgaagccacaaaaatgattgcgaatgatgtccatacactcaggagatctaaagccactgttggacgccctttgattgcttggcgatatgtacctataaatgttgttgagacactgagaacacgtggggcccccacccggatagtgagaaaagtagcccggaacctgggcaaggccacttcaggtgtccttgttgtgctggatgtagtcaaccttgtgcaagactcactggacttgcacaagggggcaaaatccgagtctgctgagtcgctgaggcagtgggctcaggagctggaggagaatctcaatgagctcacccatatccatcagagtctaaaagcaggctaggcccaattgttgcgggaagtcagggaccccaaacggagggactggctgaagccatggcagaagaacgtggattgtgaagatttcatggacatttattagttccccaaattaatacttttataatttcctatgcctgtctttaccgcaatctctaaacacaaattgtgaagatttcatggacactgatcacttccccaatcaatacccttgtgatttcttatgcctgtctttactttaatctcctaatcctgtcagctgaggaggatgtatgtcacctcaggaccatgtgataattgcgttaactgcacaaattgtagagcatgtgtgtttgaacaatatgaaatctgggcaccttgaaaaaagaacaggataacagcaattgttcagggaataagagagataaccttaaactctgaccaacagtgagcctggtggaacagagtcatatttctcttctttcaaaagcaaatgggagaaatatcgctgaattctttttctcagcaaggaacatccctgagaaagagaatgcacccctgagggtgggtctataaatggcctccttgggtgtggccatcttctatggtcgagactgtagggatgaaataaaccccagtctcccatagcgctcccaggcttattaggaagaggaaattcccgcctaataaattttggtcagaccggttgctctcaaaaccctgtctcctgataagatgttatcaatgacaatggtgcccgaaacctcattagcaattttaatttctccccggtcctgtgttcctgtgatctcgccctgcctccacttgccttgtgatattctattaccttgtgaagtaggtgatctttgtgacccacacccacaccctattcatacactccctccccttttgaaagtccctaataaaaacttgctggttttgcggcttgtgaggcatcacggaacctaccgatgtgtgatgtctcccctggacacctagctttaaaatttctctcttttgtactctgtgcctttatttctcaaaccggccaacacttagggaaaatagaaaagaacctacgtgaccatcggggcaggttccccgatacccaatgaccccagagcagtgcagccaccagggaaggtgagccagacacaggccgggacaaaacgcagacattttttaggggaataaagagggcgaggtaaagtttatggaactcagtgttaggaactttggcatctgtagctgagcacagcaggggaggggttactcaagatggcaagtgcgccaaggagaaggcagaaatgctggggcctggaataagggaggagaggggactggagagtgtggggaatggaaagaagcagtttactctagactaaagagtatattgggggaggaagagagggaggcacgtaggaacaagcaatgagaagaccaggaaaagaaagagctgaaaatggagaaagccacagttagaactgttggatacaggagaagaaacagcggctccactaaagacccgccccccggttggatgtccttccaagaatggaatccttccctggtgatggtctctcaccctgtcttaccagcatccactctcccttgtcctcccgggggtgtatctgagtcagccagtggcttcttgatgatggtggtggtggttgtagtgtgacaggtcccctttaggttatttaagggtgcatgtcccctgcttgaaccctgaaggccgggtaatgagccatttccatggtgcccagctgaggaccaggtgtctctgagaatccaaacatcctggagagtatctgagaaccaaccaagtaaaagtctcgttgctcatatatagtagacaaagagccagaaaattaactgaaaagcagtttagacattgggggaggctggatctctcgagctgtcttgctgagtgccctgtgtgtaagtcctaataaacttagctactcgcca

SEQ ID NO: 6025 - DNA, 5883 bp, Homo sapiens
atggcacagcaagctgccgataagtatctctatgtggataaaaacttcatcaacaatccgctggcccaggccgactgggctgccaagaagctggtatgggtgccttccgacaagagtggctttgagccagccagcctcaaggaggaggtgggcgaagaggccatcgtggagctggtggagaatgggaagaaggtgaaggtgaacaaggatgacatccagaagatgaacccgcccaagttctccaaggtggaggacatggcagagctcacgtgcctcaacgaagcctcggtgctgcacaacctcaaggagcgttactactcagggctcatctacacctattcaggcctgttctgtgtggtcatcaatccttacaagaacctgcccatctactctgaagagattgtggaaatgtacaagggcaagaagaggcacgagatgccccctcacatctatgccatcacagacaccgcctacaggagtatgatgcaagaccgagaagatcaatccatcttgtgcactggtgaatctggagctggcaagacggagaacaccaagaaggtcatccagtatctggcgtacgtggcgtcctcgcacaagagcaagaaggaccagggcgagctggagcggcagctgctgcaggccaaccccatcctggaggccttcgggaacgccaagaccgtgaagaatgacaactcctcccgcttcggcaaattcattcgcatcaactttgatgtcaatggctacattgttggagccaacattgagacttatcttttggagaaatctcgtgctatccgccaagccaaggaagaacggaccttccacatcttctattatctcctgtctggggctggagagcacctgaagaccgatctcctgttggagccgtacaacaaataccgcttcctgtccaatggacacgtcaccatccccgggcagcaggacaaggacatgttccaggagaccatggaggccatgaggattatgggcatcccagaagaggagcaaatgggcctgctgcgggtcatctcaggggttcttcagctcggcaacatcgtcttcaagaaggagcggaacactgaccaggcgtccatgcccgacaacacagctgcccaaaaggtgtcccatctcttgggtatcaatgtgaccgatttcaccagaggaatcctcaccccgcgcatcaaggtgggacgggattacgtccagaaggcgcagactaaagagcaggctgactttgccatcgaggccttggccaaggcgacctatgagcggatgttccgctggctggtgctgcgcatcaacaaggctctggacaagaccaagaggcagggcgcctccttcatcgggatcctggacattgccggcttcgagatctttgatctgaactcgtttgagcagctgtgcatcaattacaccaatgagaagctgcagcagctcttcaaccacaccatgttcatcctggagcaggaggagtaccagcgcgagggcatcgagtggaacttcatcgactttggcctcgacctgcagccctgcatcgacctcattgagaagccagcaggccccccgggcattctggccctgctggacgaggagtgctggttccccaaagccaccgacaagagcttcgtggagaaggtgatgcaggagcagggcacccaccccaagttccagaagcccaagcagctgaaggacaaagctgatttctgcattatccactatgccggcaaggtggattacaaagctgacgagtggctgatgaagaacatggatcccctgaatgacaacatcgccacactgctccaccagtcctctgacaagtttgtctcggagctgtggaaggatgtggaccgcatcatcggcctggaccaggtggccggcatgtcggagaccgcactgcccggggccttcaagacgcggaagggcatgttccgcactgtggggcagctttacaaggagcagctggccaagctgatggctacgctgaggaacacgaaccccaactttgtccgctgcatcatccccaaccacgagaagaaggccggcaagctggacccgcatctcgtgctggaccagctgcgctgcaacggtgttctcgagggcatccgtatctgccgccagggcttccccaacagggtggtcttccaggagtttcggcagagatatgagatcctgactccaaactccattcccaagggtttcatggacgggaagcaggcgtgcgtgctcatgataaaagccctggagctcgacagcaatctgtaccgcattggccagagcaaagtcttcttccgtgccggtgtgctggcccacctggaggaggagcgagacctgaagatcaccgacgtcatcatagggttccaggcctgctgcaggggctacctggccaggaaagcatttgccaagcggcagcagcagcttaccgccatgaaggtcctccagcggaactgcgctgcctacctgaagctgcggaactggcagtggtggcggctcttcaccaaggtcaagccgctgctgcaggtgagccggcaggaggaggagatgatggccaaggaggaggagctggtgaaggtcagagagaagcagctggctgcggagaacaggctcacggagatggagacgctgcagtctcagctcatggcagagaaattgcagctgcaggagcagctccaggcagaaaccgagctgtgtgccgaggctgaggagctccgggcccgcctgaccgccaagaagcaggaattagaagagatctgccatgacctagaggccagggtggaggaggaggaggagcgctgccagcacctgcaggcggagaagaagaagatgcagcagaacatccaggagcttgaggagcagctggaggaggaggagagcgcccggcagaagctgcagctggagaaggtgaccaccgaggcgaagctgaaaaagctggaggaggagcagatcatcctggaggaccagaactgcaagctggccaaggaaaagaaactgctggaagacagaatagctgagttcaccaccaacctcacagaagaggaggagaaatctaagagcctcgccaagctcaagaacaagcatgaggcaatgatcactgacttggaagagcgcctccgcagggaggagaagcagcgacaggagctggagaagacccgccggaagctggagggagactccacagacctcagcgaccagatcgccgagctccaggcccagatcgcggagctcaagatgcagctggccaagaaagaggaggagctccaggccgccctggccagagtggaagaggaagctgcccagaagaacatggccctcaagaagatccgggagctggaatctcagatctctgaactccaggaagacctggagtctgagcgtgcttccaggaataaagctgagaagcagaaacgggaccttggggaagagctagaggctctgaaaacagagttggaggacacgctggattccacagctgcccagcaggagctcaggtcaaaacgtgagcaggaggtgaacatcctgaagaagaccctggaggaggaggccaagacccacgaggcccagatccaggagatgaggcagaagcactcacaggccgtggaggagctggcggagcagctggagcagacgaagcgggtgaaagcaaacctcgagaaggcaaagcagactctggagaacgagcggggggagctggccaacgaggtgaaggtgctgctgcagggcaaaggggactcggagcacaagcgcaagaaagtggaggcgcagctgcaggagctgcaggtcaagttcaacgagggagagcgcgtgcgcacagagctggccgacaaggtcaccaagctgcaggtggagctggacaacgtgaccgggcttctcagccagtccgacagcaagtccagcaagctcaccaaggacttctccgcgctggagtcccagctgcaggacactcaggagctgctgcaggaggagaaccggcagaagctgagcctgagcaccaagctcaagcaggtggaggacgagaagaattccttccgggagcagctggaggaggaggaggaggccaagcacaacctggagaagcagatcgccaccctccatgcccaggtggccgacatgaaaaagaagatggaggacagtgtggggtgcctggaaactgctgaggaggtgaagaggaagctccagaaggacctggagggcctgagccagcggcacgaggagaaggtggccgcctacgacaagctggagaagaccaagacgcggctgcagcaggagctggacgacctgctggtggacctggaccaccagcgccagagcgcgtgcaacctggagaagaagcagaagaagtttgaccagctcctggcggaggagaagaccatctctgccaagtatgcagaggagcgcgaccgggctgaggcggaggcccgagagaaggagaccaaggctctgtcgctggcccgggccctggaggaagccatggagcagaaggcggagctggagcggctcaacaagcagttccgcacggagatggaggaccttatgagctccaaggatgatgtgggcaagagtgtccacgagctggagaagtccaagcgggccctagagcagcaggtggaggagatgaagacgcagctggaagagctggaggacgagctgcaggccaccgaagatgccaagctgcggttggaggtcaacctgcaggccatgaaggcccagttcgagcgggacctgcagggccgggacgagcagagcgaggagaagaagaagcagctggtcagacaggtgcgggagatggaggcagagctggaggacgagaggaagcagcgctcgatggcagtggccgcccggaagaagctggagatggacctgaaggacctggaggcgcacatcgactcggccaacaagaaccgggacgaagccatcaaacagctgcggaagctgcaggcccagatgaaggactgcatgcgcgagctggatgacacccgcgcctctcgtgaggagatcctggcccaggccaaagagaacgagaagaagctgaagagcatggaggccgagatgatccagttgcaggaggaactggcagccgcggagcgtgccaagcgccaggcccagcaggagcgggatgagctggctgacgagatcgccaacagcagcggcaaaggagccctggcgttagaggagaagcggcgtctggaggcccgcatcgcccagctggaggaggagctggaggaggagcagggcaacacggagctgatcaacgaccggctgaagaaggccaacctgcagatcgaccagatcaacaccgacctgaacctggagcgcagccacgcccagaagaacgagaatgctcggcagcagctggaacgccagaacaaggagcttaaggtcaagctgcaggagatggagggcactgtcaagtccaagtacaaggcctccatcaccgccctcgaggccaagattgcacagctggaggagcagctggacaacgagaccaaggagcgccaggcagcctgcaaacaggtgcgtcggaccgagaagaagctgaaggatgtgctgctgcaggtggatgacgagcggaggaacgccgagcagtacaaggaccaggccgacaaggcatctacccgcctgaagcagctcaagcggcagctggaggaggccgaagaggaggcccagcgggccaacgcctcccgccggaaactgcagcgcgagctggaggacgccactgagacggccgatgccatgaaccgcgaagtcagctccctaaagaacaagctcaggcgcggggacctgccgtttgtcgtgccccgccgaatggcccggaaaggcgccggggatggctccgacgaagaggtagatggcaaagcggatggggctgaggccaaacctgccgaataa

SEQ ID NO: 6026 - protein, 1960 aa, Homo sapiens
MAQQAADKYLYVDKNFINNPLAQADWAAKKLVWVPSDKSGFEPASLKEEVGEEAIVELVENGKKVKVNKDDIQKMNPPKFSKVEDMAELTCLNEASVLHNLKERYYSGLIYTYSGLFCVVINPYKNLPIYSEEIVEMYKGKKRHEMPPHIYAITDTAYRSMMQDREDQSILCTGESGAGKTENTKKVIQYLAYVASSHKSKKDQGELERQLLQANPILEAFGNAKTVKNDNSSRFGKFIRINFDVNGYIVGANIETYLLEKSRAIRQAKEERTFHIFYYLLSGAGEHLKTDLLLEPYNKYRFLSNGHVTIPGQQDKDMFQETMEAMRIMGIPEEEQMGLLRVISGVLQLGNIVFKKERNTDQASMPDNTAAQKVSHLLGINVTDFTRGILTPRIKVGRDYVQKAQTKEQADFAIEALAKATYERMFRWLVLRINKALDKTKRQGASFIGILDIAGFEIFDLNSFEQLCINYTNEKLQQLFNHTMFILEQEEYQREGIEWNFIDFGLDLQPCIDLIEKPAGPPGILALLDEECWFPKATDKSFVEKVMQEQGTHPKFQKPKQLKDKADFCIIHYAGKVDYKADEWLMKNMDPLNDNIATLLHQSSDKFVSELWKDVDRIIGLDQVAGMSETALPGAFKTRKGMFRTVGQLYKEQLAKLMATLRNTNPNFVRCIIPNHEKKAGKLDPHLVLDQLRCNGVLEGIRICRQGFPNRVVFQEFRQRYEILTPNSIPKGFMDGKQACVLMIKALELDSNLYRIGQSKVFFRAGVLAHLEEERDLKITDVIIGFQACCRGYLARKAFAKRQQQLTAMKVLQRNCAAYLKLRNWQWWRLFTKVKPLLQVSRQEEEMMAKEEELVKVREKQLAAENRLTEMETLQSQLMAEKLQLQEQLQAETELCAEAEELRARLTAKKQELEEICHDLEARVEEEEERCQHLQAEKKKMQQNIQELEEQLEEEESARQKLQLEKVTTEAKLKKLEEEQIILEDQNCKLAKEKKLLEDRIAEFTTNLTEEEEKSKSLAKLKNKHEAMITDLEERLRREEKQRQELEKTRRKLEGDSTDLSDQIAELQAQIAELKMQLAKKEEELQAALARVEEEAAQKNMALKKIRELESQISELQEDLESERASRNKAEKQKRDLGEELEALKTELEDTLDSTAAQQELRSKREQEVNILKKTLEEEAKTHEAQIQEMRQKHSQAVEELAEQLEQTKRVKANLEKAKQTLENERGELANEVKVLLQGKGDSEHKRKKVEAQLQELQVKFNEGERVRTELADKVTKLQVELDNVTGLLSQSDSKSSKLTKDFSALESQLQDTQELLQEENRQKLSLSTKLKQVEDEKNSFREQLEEEEEAKHNLEKQIATLHAQVADMKKKMEDSVGCLETAEEVKRKLQKDLEGLSQRHEEKVAAYDKLEKTKTRLQQELDDLLVDLDHQRQSACNLEKKQKKFDQLLAEEKTISAKYAEERDRAEAEAREKETKALSLARALEEAMEQKAELERLNKQFRTEMEDLMSSKDDVGKSVHELEKSKRALEQQVEEMKTQLEELEDELQATEDAKLRLEVNLQAMKAQFERDLQGRDEQSEEKKKQLVRQVREMEAELEDERKQRSMAVAARKKLEMDLKDLEAHIDSANKNRDEAIKQLRKLQAQMKDCMRELDDTRASREEILAQAKENEKKLKSMEAEMIQLQEELAAAERAKRQAQQERDELADEIANSSGKGALALEEKRRLEARIAQLEEELEEEQGNTELINDRLKKANLQIDQINTDLNLERSHAQKNENARQQLERQNKELKVKLQEMEGTVKSKYKASITALEAKIAQLEEQLDNETKERQAACKQVRRTEKKLKDVLLQVDDERRNAEQYKDQADKASTRLKQLKRQLEEAEEEAQRANASRRKLQRELEDATETADAMNREVSSLKNKLRRGDLPFVVPRRMARKGAGDGSDEEVDGKADGAEAKPAE

SEQ ID NO: 6027 - DNA, 1881 bp, Homo sapiens
gaattcggcacgagctaacgcggtccccggcacgcaccatctgttgccatcccggccggccgaggccattgcagattttggaagatggcaaagttcatgacacccgtgatccaggacaacccctcaggctggggtccctgtgcggttcccgagcagtttcgggatatgccctaccagccgttcagcaaaggagatcggctaggaaaggttgcagactggacaggagccacataccaagataagaggtacacaaataagtactcctctcagtttggtggtggaagtcaatatgcttatttccatgaggaggatgaaagtagcttccagctggtggatacagcgcgcacacagaagacggcctaccagcggaatcgaatgagatttgcccagaggaacctccgcagagacaaagatcgtcggaacatgttgcagttcaacctgcagatcctgcctaagagtgccaaacagaaagagagagaacgcattcgactgcagaaaaagttccagaaacaatttggggttaggcagaaatgggatcagaaatcacagaaaccccgagactcttcagttgaagttcgtagtgattgggaagtgaaagaggaaatggattttcctcagttgatgaagatgcgctacttggaagtatcagagccacaggacattgagtgttgtggggccctagaatactacgacaaagcctttgaccgcatcaccacgaggagtgagaagccactgcggagcatcaagcgcatcttccacactgtcaccaccacagacgaccctgtcatccgcaagctggcaaaaactcaggggaatgtgtttgccactgatgccatcctggccacgctgatgagctgtacccgctcagtgtattcctgggatattgtcgtccagagagttgggtccaaactcttctttgacaagagagacaactctgactttgacctcctgacagtgagtgagactgccaatgagccccctcaagatgaaggtaattccttcaattcaccccgcaacctggccatggaggcaacctacatcaaccacaatttctcccagcagtgcttgagaatggggaaggaaagatacaacttccccaacccaaacccgtttgtggaggacgacatggataagaatgaaatcgcctctgttgcgtaccgttaccgcaggtggaagcttggagatgatattgaccttattgtccgttgtgagcacgatggcgtcatgactggagccaacggggaagtgtccttcatcaacatcaagacactcaatgagtgggattccaggcactgtaatggcgttgactggcgtcagaagctggactctcagcgaggggctgtcattgccacggagctgaagaacaacagctacaagttggcccggtggacctgctgtgctttgctggctggatctgagtacctcaagcttggttatgtgtctcggtaccacgtgaaagactcctcacgccacgtcatcctaggcacccagcagttcaagcctaatgagtttgccagccagatcaacctgagcgtggagaatgcctggggcattttacgctgcgtcattgacatctgcatgaagctggaggagggcaaatacctcatcctcaaggaccccaacaagcaggtcatccgtgtctacagcctccctgatggcaccttcagctctgatgaagatgaggaggaagaggaggaggaagaagaggaagaagaagaggaagaaacttaaaccagtgatgtggagctggagtttgtccttccaccgagactacgagggcctttgatgcttagtggaatgtgtgtctaacttgctctctgacatttagcagatgaaataaaatatatatctgtttagtcttttaaaaaaaaaaaaaaaaaa

SEQ ID NO: 6028 - protein, 548 aa, Homo sapiens
MAKFMTPVIQDNPSGWGPCAVPEQFRDMPYQPFSKGDRLGKVADWTGATYQDKRYTNKYSSQFGGGSQYAYFHEEDESSFQLVDTARTQKTAYQRNRMRFAQRNLRRDKDRRNMLQFNLQILPKSAKQKERERIRLQKKFQKQFGVRQKWDQKSQKPRDSSVEVRSDWEVKEEMDFPQLMKMRYLEVSEPQDIECCGALEYYDKAFDRITTRSEKPLRSIKRIFHTVTTTDDPVIRKLAKTQGNVFATDAILATLMSCTRSVYSWDIVVQRVGSKLFFDKRDNSDFDLLTVSETANEPPQDEGNSFNSPRNLAMEATYINHNFSQQCLRMGKERYNFPNPNPFVEDDMDKNEIASVAYRYRRWKLGDDIDLIVRCEHDGVMTGANGEVSFINIKTLNEWDSRHCNGVDWRQKLDSQRGAVIATELKNNSYKLARWTCCALLAGSEYLKLGYVSRYHVKDSSRHVILGTQQFKPNEFASQINLSVENAWGILRCVIDICMKLEEGKYLILKDPNKQVIRVYSLPDGTFSSDEDEEEEEEEEEEEEEEET

SEQ ID NO: 6029 - DNA, 1341 bp, Homo sapiens
ggggggcgggaggaggggacagctgcgggcgcggggagggggcgccgcgccgcgggggccatggcggagccaggaagccgggagtccgagacccgggcccgcagcccgagtgtcgccgccatggcttcgccgcagctctgccgcgcgctggtgtcggcgcaatgggtggcggaggcgctgcgggccccgcgcgctgggcagcctctgcagctgctggacgcctcctggtacctgccgaagctggggcgcgacgcgcgacgcgagttcgaggagcgccacatcccgggcgccgctttcttcgacatcgaccagtgcagcgaccgcacctcgccctacgaccacatgctgcccggggccgagcatttcgcggagtacgcaggccgcctgggcgtgggcgcggccacccacgtcgtgatctacgacgccagcgaccagggcctctactccgccccgcgcgtctggtggatgttccgcgccttcggccaccacgccgtgtcactgcttgatggcggcctccgccactggctgcgccagaacctcccgctcagctccggcaagagccaacctgctcccgccgagttccgcgctcagctcgaccccgccttcatcaagacctacgaggacatcaaggagaacctggaatcccggcgcttccaggtggtggactcccgagccactggcaggttccgcggcaccgagcccgagccccgagacggcattgaacctggccacatcccaggtaccgtgaacatccccttcacagacttcctgagccaggaggggctggagaagagccctgaggagatccgccatctgttccaggagaagaaagtggacctgtctaagccactggtggccacgtgtggctctggcgtcacagcctgccacgtggcactaggggcctacctctgcggcaagccagacgtgcccatctacgatggctcctgggtggagtggtacatgcgcgcccggcccgaggatgtcatctcagagggccgggggaagacccactgaagctgggcaggacacaggcgagctcaggtgatgccggccaccagcaatgcctggcctggtagctccgcttctgctttcaccaagagagtgtttcttcactcaactcaggtggcatttggggtgacatctcaaaggccaggaattccgttgacttgttggctgccagtaggggcgggaggaaaggcggaggcgagccctggaggagggaggccacaactccgagctgcccacctggtgctgagctggggccccgcctcctttctgttttatttttgaggaaataaaataaccaagtgataaaaaaaaaaaaaaaaaaaaaaaaaaaaa

SEQ ID NO: 6030 - protein, 297 aa, Homo sapiens
MASPQLCRALVSAQWVAEALRAPRAGQPLQLLDASWYLPKLGRDARREFEERHIPGAAFFDIDQCSDRTSPYDHMLPGAEHFAEYAGRLGVGAATHVVIYDASDQGLYSAPRVWWMFRAFGHHAVSLLDGGLRHWLRQNLPLSSGKSQPAPAEFRAQLDPAFIKTYEDIKENLESRRFQVVDSRATGRFRGTEPEPRDGIEPGHIPGTVNIPFTDFLSQEGLEKSPEEIRHLFQEKKVDLSKPLVATCGSGVTACHVALGAYLCGKPDVPIYDGSWVEWYMRARPEDVISEGRGKTH

SEQ ID NO: 6031 - DNA, 2131 bp, Homo sapiens
gcgactctcccgggctgccagccgggacgcgcggccgccgccgctgcagacgacgagtccgccctcgtcccgcgcccccggggctcgcggagccaggtctccacctctgggcaggagagttgccgaccacctcgggggtgctttctctgcgcttgaacatctatagctgcttctgaggggctgggagccgggcccctgggagagacgagccatgaaccccccacagcctctgcatttggggacctcaccttaggagagtgccatttacagcttccgccagggcaaaggagctgagcagccatcccaagcccagcccacctccctcccccggcccctggtaggcatggactagcagctgtgagcagccagagctgatgcccggcccccaggggggcagaggcgccgccaccatgagcctgggcaagctctcgcctgtgggctgggtgtccagttcacagggaaagaggcggctgactgcagacatgatcagccacccactcggggacttccgccacaccatgcatgtgggccgtggcggggatgtcttcggggacacgtccttcctcagcaaccacggtggcagctccgggagcacccatcgctcaccccgcagcttcctggccaagaagctgcagctggtgcggagggtgggggcgcccccccggaggatggcatctccccctgcaccctccccggctccaccggccatctcccccatcatcaagaacgccatctccctgccccagctcaaccaggccgcctacgacagcctcgtggttggcaagctcagcttcgacagcagccccaccagctccacggacggccactccagctacggcctggactctgggttctgcaccatctcccgcctgccccgctcggaaaagccgcatgaccgagaccgggatggttccttcccctctgagcccgggcttcgccgctctgactctctcttgtccttccgcctggacctcgaccttgggccctcactcctcagcgagctgctaggggtcatgagcctcccagaagcccctgcagctgagactccagcccccgctgcaaaccccccagcccctactgcaaaccccacgggtcctgctgcaaaccccccagccactactgcaaaccccccagcgcctgctgcaaacccctcagcacctgccgcaacccccacgggtcctgctgcaaatcccccagcccctgccgcaagctccacaccccatggacactgtcccaatggggtaacagctgggttgggcccagtggctgaggtgaagtccagcccagtgggagggggtccccgaggacctgctggccctgccctcggcaggcactggggagcaggctgggatggcggccaccactacccagagatggatgcgcggcaggagcgggtggaggtgctgccccaagcccgggcctcctgggagagcctggacgaagagtggagggcgccccaggcaggcagcaggaccccagtgcccagcacagtgcaagcaaacacctttgaatttgcggatgctgaggaggatgatgaggtcaaggtgtgaggggctggggcacggtcccagggccccacctaggtgcagagccggcccctcacctaacagctggttcctaccagaccggagaggggagaagtcatgttgcccctaaacccctccccacctctgcaggacagacatgggagggaggacagggaaggccaggcttgctctgggacttttatgctcccagaggccctgccaaactgaccacctcccccgactgccactctggacctaatagctgttccttaggccccactccatgccacccccaccagctggaggacccagcctcacagtgtgtcctttgtgccagaccaagcggcccgtggggggtggggggcagggagtgtaccacacagggccattgtctcacctcccaaagggaccgcctgcccccagctcatcccagagcgtccctgctgcaaccctgacagccgtctcccaggccgcttccccaacatccccgccccagcctccctcttaccccagaaaggtcaggtatgacctcccggggaggaatcccacctgcctgtataccccagacttgcctctggggcctgattaaataaggctgttttgat

SEQ ID NO: 6032 - DNA, 2800 bp, Homo sapiens
gggggccggtggcggatggagcccgcgatggagccggagactctggaggcgcgaatcaatagagccacgaaccccctgaacaaggagctcgactgggccagcatcaacggcttctgcgagcagctcaacgaggactttgaggggcctccactcgccacccggctgctggcccacaagatccagtccccacaggagtgggaggcgatccaggccttgacggtgctggaaacatgcatgaagagctgcggcaagcggttccacgacgaagtgggcaagttccgctttctcaacgagctcatcaaggtcgtgtctcccaagtatctgggctctcggacatcggagaaggtgaagaacaagatcttggagctcctctacagctggacagtgggcctgcccgaggaggtgaaaatcgcagaggcctaccagatgctaaagaagcaggggattgtaaagtccgaccccaagcttccagatgacactacctttccccttcctcctccacggccgaagaatgtgatctttgaagatgaggagaaatccaagatgctggcccgcctgctgaagagctcccatcccgaagacctccgcgcagccaataagctcatcaaagagatggtgcaggaggaccagaagcggatggagaagatctcgaagagggtgaatgccatcgaggaggtgaacaacaatgtgaaactgctcacggagatggtgatgagccacagccagggcggcgcagcagctggcagcagcgaggacctcatgaaggaactgtaccagcgctgtgagcggatgcggcccacgctcttccgactggcgagtgacacagaggacaatgatgaggccttagcggagatcctgcaggccaatgacaacctcacccaggtgatcaacctgtataagcagctggtgcggggtgaggaggtcaacggtgatgccacagccggctccatccctgggagcacctcggccctgctggatctctcaggcctggatctcccgcctgcgggcaccacctacccagctatgcccacccgccctggcgagcaggccagccctgagcagcccagtgcctcagtttccctgcttgacgacgagctcatgtctctgggcctcagtgaccccacacccccttcaggcccaagcctggatggtaccggatggaacagcttccagtcgtcggatgccactgagcccccagcccctgctctggcccaggcccccagtatggaaagccgacccccagcgcagacatccctgccagcaagcagcggtctggacgacctagacctcctggggaagaccctcctgcagcagtcgctgcccccggaatcccagcaagtgcggtgggagaagcagcagccaaccccccggctcacactccgggacctgcagaataagagcagcagctgcagctcccccagctccagcgccaccagccttctccacaccgtgtccccagagccccccaggcctccgcagcagcccgtaccaaccgagctctcactggccagcatcactgtgcccctggagtccatcaaacccagcaacatcctgcccgtgactgtgtatgaccagcacggcttccgcatcctcttccattttgcccgggacccactgccagggcgctccgacgtgctggtggtggtggtttccatgctgagcaccgccccccagcccatccgcaacatcgtgttccagtcagctgtccccaaggttatgaaggtgaagctgcagccaccctcgggcacggagctgccagcttttaaccccatcgtccacccctcagcaatcacccaggtcctgctgcttgccaacccccagaaggagaaggttcgcctccgctacaagctcaccttcaccatgggtgaccagacctacaacgagatgggggatgtggaccagttccccccacctgaaacctggggtagcctctagaacagaggggctggggagaggaaggggcagagggaccggtcactgtccagcctggagggaggcattggtggccaaggacaccctttgttgcccatggccattcacccccaggcctggtgcttctccccacacccctgtaggcctcaagtgactcttccccctcctgctccggccccgcccctgctgagccaaacccagtaggaggctgggcctgggtttgtgccgctggggtctccatcaccgggacctggagagggaggggctgtgtagccttggaagaacttgggtcatggggaggaagcacagctgttggggaagggccaggacctcaggcccagccccaaccccagctggggtggggtcttccccacctgtctcttatgccttatgggaaggcccagccataactcgggggccatgctggagctggggaccagcttaggcctcctccataggaacccagtgactggggggtgacgcctacacccccagctatttgcactctggtgtgtggtttgactctgcttttcttccggattggccctgtggtcacagcctcagggggccaggctgggggaacctcacctggcccgtactcctgggggtttccctttgccattgggccccctgagggactgtgggggctcaagggtaatgccagaggcccatggccccagcgaggggctgtggggcacctagagttctcggtgtgtctccttcattcattggcctctgctggggcctcctatgggtgtcttacgtctgtccatccatctgtccgtggtcagaagtggggtcagtgtgtgagtgagagcaggagtatttatgaaaataaaacgtcgtttttcctggaaaaaaaaaaaaa

SEQ ID NO: 6033 - protein, 639 aa, Homo sapiens
MEPAMEPETLEARINRATNPLNKELDWASINGFCEQLNEDFEGPPLATRLLAHKIQSPQEWEAIQALTVLETCMKSCGKRFHDEVGKFRFLNELIKVVSPKYLGSRTSEKVKNKILELLYSWTVGLPEEVKIAEAYQMLKKQGIVKSDPKLPDDTTFPLPPPRPKNVIFEDEEKSKMLARLLKSSHPEDLRAANKLIKEMVQEDQKRMEKISKRVNAIEEVNNNVKLLTEMVMSHSQGGAAAGSSEDLMKELYQRCERMRPTLFRLASDTEDNDEALAEILQANDNLTQVINLYKQLVRGEEVNGDATAGSIPGSTSALLDLSGLDLPPAGTTYPAMPTRPGEQASPEQPSASVSLLDDELMSLGLSDPTPPSGPSLDGTGWNSFQSSDATEPPAPALAQAPSMESRPPAQTSLPASSGLDDLDLLGKTLLQQSLPPESQQVRWEKQQPTPRLTLRDLQNKSSSCSSPSSSATSLLHTVSPEPPRPPQQPVPTELSLASITVPLESIKPSNILPVTVYDQHGFRILFHFARDPLPGRSDVLVVVVSMLSTAPQPIRNIVFQSAVPKVMKVKLQPPSGTELPAFNPIVHPSAITQVLLLANPQKEKVRLRYKLTFTMGDQTYNEMGDVDQFPPPETWGSL

SEQ ID NO: 6034 - DNA, 2434 bp, Homo sapiens
ctgcaggtagaacagcggctggagccggccaagcgggcagcccacaacatccacaagcggctgcaggcctgtctgcagggccagagcggggcagacatggacaagcgggtgaagaagcttcccctcatggctctgtccaccacgatggctgagagcttcaaggagctggaccctgattccagcatggggaaggccttggagatgagctgtgccatccagaatcagctggcccgcatcctggccgagtttgagatgaccctggagagggacgtcctgcagccactcagcaggctgagtgaggaggagctgccagccatcctcaaacacaagaaaagcctccagaagctcgtgtccgactggaacacactcaagagcaggctcagtcaggcaaccaagaattcaggcagcagtcaaggcctaggaggcagcccgggtagtcacagccatacgaccatggccaacaaggtggagacgctgaaggaggaggaggaggagctgaagaggaaagtggagcaatgcagggacgagtacttggctgacctgtaccactttgttaccaaggaggactcctatgccaactacttcattcgtctcctggagattcaggccgattaccatcgcaggtcactgagctcgctggacacagccctggctgagctgagggagaaccacggccaagcagaccactccccttcgatgacagccacccacttccccagggtgtatggggtgtcgctggcaacccacctgcaagagctgggccgggagattgccctgcccatcgaggcctgcgtcatgatgctgctttctgagggcatgaaggaagagggtctcttccgtctggctgctggggcctcggtgctgaagcgtctcaagcagacaatggcctcggacccccacagcctggaggagttctgctccgacccgcacgctgtggcaggtgccctcaagtcctatctgcgggagctgccagagcctctgatgaccttcgacctctatgatgactggatgagggcagccagcctgaaggagccaggggcccggctgcaggccctccaagaggtgtgcagccgcctaccccccgagaacctcagcaacctcaggtacctgatgaagttcctggcacggctggccgaggagcaggaggtgaacaagatgacacccagcaacatcgccatagtcctgggacccaacttgctgtggccacctgagaaagaaggggaccaggcccagctggatgcagcctccgtgtcttccatccaggtggtgggcgtcgtcgaggcgctgatccagagcgcagacaccctcttccctggagacatcaacttcaacgtgtcaggcctcttctcagctgttaccctccaggacacagtcagtgacaggctggcctctgaggaacttccgtccactgccgtgcccaccccagccaccaccccggctccggctccggctccagctccagctccggccccagccttggcttcagcagctaccaaggaaaggacagagtctgaggtgcctcccagaccagcctcccccaaggtcaccaggagtcccccggagacagctgccccagtggaggacatggctcggaggaccaagcgcccggcgccagcccggcccaccatgccgcccccccaggtctccggctcccgctcctcccctccagccccgcccttgccccctggctctggcagccctgggaccccccaagccctgccccgacgtctggttggcagcagcctccgagcccccacagtgccacccccgttaccccccacaccccctcagcctgcccggcgccaaagccggcgttcaccagcctcccccagcccggcctccccaggtccagcctcccccagcccagtctctttgagtaaccctgcacaggtggacctgggggctgccacagcagagggaggagcccctgaggctatcagtggggtccccactcccccagctatcccccctcagccccgccccaggagccttgcctcagagaccaactgagtggctggtttctccctaagcagccctcagcaccccctccctccccacctggccctcccaggacagctctcgccccccacaaaggggcatgggcctccagcctttgcccacaagtgcctcagtgcccactgggtcggcccccatggccaggagggctcaggacaatcctctatttcctgaccttttcctcgtccaccctgggcttggggacccccccaccggactctccactctccggcaggtcctaggggagccaccggaaggaaggagaggtttgcctgctcctacgggactgattcttctcttgccgacatgttttttgtaaggctggtaaataaattattttggacaaaaaaaaaaaaaaaaaaaaaaaaaaaaaaaaaaaaaaaaaaaaaaaaaaaaaaaaaaaaaaaaaaaactcggg

SEQ ID NO: 6035 - protein, 621 aa, Homo sapiens
MAESFKELDPDSSMGKALEMSCAIQNQLARILAEFEMTLERDVLQPLSRLSEEELPAILKHKKSLQKLVSDWNTLKSRLSQATKNSGSSQGLGGSPGSHSHTTMANKVETLKEEEEELKRKVEQCRDEYLADLYHFVTKEDSYANYFIRLLEIQADYHRRSLSSLDTALAELRENHGQADHSPSMTATHFPRVYGVSLATHLQELGREIALPIEACVMMLLSEGMKEEGLFRLAAGASVLKRLKQTMASDPHSLEEFCSDPHAVAGALKSYLRELPEPLMTFDLYDDWMRAASLKEPGARLQALQEVCSRLPPENLSNLRYLMKFLARLAEEQEVNKMTPSNIAIVLGPNLLWPPEKEGDQAQLDAASVSSIQVVGVVEALIQSADTLFPGDINFNVSGLFSAVTLQDTVSDRLASEELPSTAVPTPATTPAPAPAPAPAPAPALASAATKERTESEVPPRPASPKVTRSPPETAAPVEDMARRTKRPAPARPTMPPPQVSGSRSSPPAPPLPPGSGSPGTPQALPRRLVGSSLRAPTVPPPLPPTPPQPARRQSRRSPASPSPASPGPASPSPVSLSNPAQVDLGAATAEGGAPEAISGVPTPPAIPPQPRPRSLASETN

SEQ ID NO: 6036 - DNA, 2053 bp, Homo sapiens
ggcacgagggccgtgcccgcggagagagcgcggcgcgggaggccggcggccggccggctgcatggcgcgctgcgagaggctgcgcggagcggccctgcgcgacgtgctgggccgggcgcagggggtcctgttcgactgtgacggggtgctgtggaacggcgagcgcgccgtgccgggcgccccggagctgctggagcggctggcgcgggccggcaaggcggctctgtttgtgagcaacaacagccggcgcgcgcggcccgagctggccctgcgcttcgcgcgcctcggcttcggggggctgcgcgccgagcagctcttcagctccgcgctgtgcgccgcgcgcctgctgcgccagcgcctgcccgggcctccggacgcgccgggcgccgtgttcgtgctgggcggcgaggggctgcgcgccgagctgcgcgccgcggggctgcgcctggccggggacccgagcgcgggggacggcgcggccccgcgcgtgcgcgccgtgcttgtgggctacgacgagcacttctccttcgccaagctgagggaggcgtgcgcgcacctgcgcgaccccgagtgcctactcgtggccaccgaccgtgacccatggcacccgctgagcgacggcagccggacccctggcaccgggagcctggccgctgcagtggagacagcctcgggacgccaggccctggtggtgggcaagcccagcccctacatgttcgagtgcatcacggagaacttcagcatcgaccccgcacgcacgcttatggtgggtgaccgcctggagaccgacatcctctttggccaccgctgcggcatgaccactgtgctcacgctcacaggagtctcccgcctagaagaggcccaggcctacctagcggccggccagcacgacctcgtgccccattactatgtggagagcatcgcagacttgacagaggggttggaggactgagcccactgcacctgcagccacaggcccacccctccccactccctgatcccgtaggtggaggcgatgggtcacgagccatgttaagcacaaccggctccttggtccagttctgcaccggggtggggctgggacccggggaaggtttgagggcccttgcaaccccctcccagcagtggctgggcactctttgctgccccagaagctggtcccctatggattcatcttggcctgacccagccaggtggccttatttcttccctgtcacctcccctccttgaaatctgggccctggtgcctgctgaagattccctctatccctgagtacttagtcttctcccccttccctggggcttctagagctctctctgcccctcaggtcctggcccttgggtccttgtcaaccagaggtctagggaaccacaacccttattgtcctgggtggaccaatccaaaggctaagtgatagtgactcatcaatgttgggtcctgtggggtaccagtttaggttcctaagtaatagtgaccctttcacgtcctggagcccgagtggaccaatcggaagcctaagtgacgatgaccctcgcatgtcctaggtccctgggtggacccatcaggaccccaagtgatagtgacccagtggtcttttagatcctcagtagaacagtccagaagcctgagagacagtggccccttgataatctgggtctcacgggaccagctaggggtccaggtttcagtcagtaaataagagtggtccacgtcctaaagacacctctcctttacaaagacttgtgatgctctggggcttctgtggccaagccccaccctttcctggtcatggtacccgtacagcgttgatggccacagctcgaaggggggctttcgtgtccccctgtgcggtcagtgttttcagtaccacctctctcccgtgcccacttggctatttacttatttatttattgtgtgccagtgatggtgggtgggggctgggccttccccgccacctccacccctgttgtgacctgtccttccgtacttaataaagtgcgcgtgggagtgttaaaaaaaaaaaaaaaaaaaaaaaaaaaaaaaaaaaaaaaa

SEQ ID NO: 6037 - protein, 296 aa, Homo sapiens
MARCERLRGAALRDVLGRAQGVLFDCDGVLWNGERAVPGAPELLERLARAGKAALFVSNNSRRARPELALRFARLGFGGLRAEQLFSSALCAARLLRQRLPGPPDAPGAVFVLGGEGLRAELRAAGLRLAGDPSAGDGAAPRVRAVLVGYDEHFSFAKLREACAHLRDPECLLVATDRDPWHPLSDGSRTPGTGSLAAAVETASGRQALVVGKPSPYMFECITENFSIDPARTLMVGDRLETDILFGHRCGMTTVLTLTGVSRLEEAQAYLAAGQHDLVPHYYVESIADLTEGLED

SEQ ID NO: 6038 - DNA, 526 bp, Homo sapiens
atctctctcgggtggagtccttctgacagctggtgcgcctgcccgggaacatcctcctggactcaatcatggcttgtggtctggtcgccagcaacctgaatctcaaacctggagagtgccttcgagtgcgaggcgaggtggctcctgacgctaagagcttcgtgctgaacctgggcaaagacagcaacaacctgtgcctgcacttcaaccctcgcttcaacgcccacggcgacgccaacaccatcgtgtgcaacagcaaggacggcggggcctgggggaccgagcagcgggaggctgtctttcccttccagcctggaagtgttgcagaggtgtgcatcaccttcgaccaggccaacctgaccgtcaagctgccagatggatacgaattcaagttccccaaccgcctcaacctggaggccatcaactacatggcagctgacggtgacttcaagatcaaatgtgtggcctttgactgaaatcagccagcccatggcccccaataaaggcagctgcctctgctcccctg

SEQ ID NO: 6039 - protein, 135 aa, Homo sapiens
MACGLVASNLNLKPGECLRVRGEVAPDAKSFVLNLGKDSNNLCLHFNPRFNAHGDANTIVCNSKDGGAWGTEQREAVFPFQPGSVAEVCITFDQANLTVKLPDGYEFKFPNRLNLEAINYMAADGDFKIKCVAFD

SEQ ID NO: 6040 - DNA, 2687 bp, Homo sapiens
gggcggatggaaggggccggggcagcgtcggggaaaggaagggccggaggcgcggcggcgggcggccgagaggggcggcggcggcggcggcggcggggttcccgcgccgcggagcccggcccgagagccgcgtccacgttcctgcctcctgctcccgccgccctggggcgccgccatgacgcccgatctgctcaacttcaagaagggatggatgtcgatcttggacgagcctggagagcctccctccccctcgctcaccaccacctctacttcgcagtggaagaaacattggtttgtgctgacagattcaagtctcaaatattacagagactccactgctgaggaggcagatgagctggatggtgagatcgacctgcgttcctgcacggatgtcactgagtacgcggtgcagcgcaactatggcttccagatccacaccaaggatgctgtctataccttgtcggccatgacctcaggcatccggcggaactggatcgaggctctgagaaagaccgtacgtccaacttcagccccagatgtcaccaagctctcggactctaacaaggagaacgcgctgcacagctacagcacccagaagggccccctgaaggcaggggagcagcgggcgggctctgaggtcatcagccggggtggccctcggaaggcggacgggcagcgtcaggccttggactacgtggagctctcgccgctgacccaggcttccccgcagcgggcccgcaccccagcccgcactcctgaccgcctggccaagcaggaggagctggagcgggacctggcccagcgctccgaggagcggcgcaagtggtttgaggccacagacagcaggaccccagaggtgcctgctggtgaggggccgcgccggggcctgggtgcccccctgactgaggaccagcaaaaccggcttagtgaggagatcgagaagaagtggcaggagctggagaagctgcccctgcgggagaataagcgggtgcccctcactgccctgctcaaccaaagccgcggagagcgccgagggcccccaagtgacggccacgaggcactggagaaggaggttcaggctcttcgggcccagctggaggcgtggcgtctccaaggggaggctcctcagagtgcactgagatcccaggaggatggccacatccccccgggctacatctcacaggaggcatgtgagcgcagcctggcagagatggagtcctcgcaccagcaggtgatggaggagctgcagcggcaccacgagcgggagctgcagcgcctgcagcaggagaaggagtggctcctggctgaggagacggcagccacggcctcagccattgaagccatgaagaaggcctaccaggaagagctgagccgagagctgagcaaaacacggagtctccagcagggcccggatggcctccggaagcagcaccagtcagatgtggaggcactgaagcgagagctgcaggtgctatcggagcagtactcgcagaagtgcctggagattggggcactcatgcggcaggctgaggagcgcgagcacacgctgcgccgctgccagcaggagggccaggagctgctgcgccacaaccaggagctgcatggccgcctgtcagaggagatagaccagctgcgcggcttcattgcctcgcagggcatgggcaatggctgcgggcgcagcaacgagcggagttcctgcgagctagaggtgctgcttcgcgtaaaagaaaacgaactccagtacctaaagaaggaggtgcagtgcctccgggacgagctccagatgatgcagaaggacaagcgcttcacctcgggaaagtaccaggacgtctatgtggagctgagccacatcaagacacggtctgagcgggagatcgagcagctgaaggagcacctgcgtcttgccatggccgccctccaggagaaggagtcgatgcgcaacagcctggctgagtagaggtcccgcccagctgcagaccctccaggctggaggaccagccgccctccttccctcctggatggaagtaaaaagccaagctttctccccaccctctgtgggccacacgtgcacttgcacccaccacacacacacacacacacacacacacacacacagacacacagacacatacgcacacacgtgcacacatgtacacacggatacacacacacacacacacactgcatatctgagcgcgcccctcgcactgggtctcaccttgcaccttcttcaggattttatatgtgaagagatttttatatagatttttttcctttttttccaaaacactttatactttaaaaaaaaaaaaaaaaagcaattcctggtggctgtgtgcctccaaccctggtccccctctgtctccagccaccctctgcttgggcttctgagctggtggccctggcccagaggtctggcggaggcccaggcagcagccatggcggggtgtctctacaggggagaggcgggagcctgccaccctcttcctgccctacctcctactaacacttcctgccccatttggacccgtaccatggggctcaggacagagggagctagcagctggcctccatggccccacagcctccttcgaggctgtgctgggtgcagaaccgccagagccacccaaaaggtgtttctcttctgctccctgaacctcttaacttaataaaacgttccagcagct

SEQ ID NO: 6041 - protein, 593 aa, Homo sapiens
MTPDLLNFKKGWMSILDEPGEPPSPSLTTTSTSQWKKHWFVLTDSSLKYYRDSTAEEADELDGEIDLRSCTDVTEYAVQRNYGFQIHTKDAVYTLSAMTSGIRRNWIEALRKTVRPTSAPDVTKLSDSNKENALHSYSTQKGPLKAGEQRAGSEVISRGGPRKADGQRQALDYVELSPLTQASPQRARTPARTPDRLAKQEELERDLAQRSEERRKWFEATDSRTPEVPAGEGPRRGLGAPLTEDQQNRLSEEIEKKWQELEKLPLRENKRVPLTALLNQSRGERRGPPSDGHEALEKEVQALRAQLEAWRLQGEAPQSALRSQEDGHIPPGYISQEACERSLAEMESSHQQVMEELQRHHERELQRLQQEKEWLLAEETAATASAIEAMKKAYQEELSRELSKTRSLQQGPDGLRKQHQSDVEALKRELQVLSEQYSQKCLEIGALMRQAEEREHTLRRCQQEGQELLRHNQELHGRLSEEIDQLRGFIASQGMGNGCGRSNERSSCELEVLLRVKENELQYLKKEVQCLRDELQMMQKDKRFTSGKYQDVYVELSHIKTRSEREIEQLKEHLRLAMAALQEKESMRNSLAE

SEQ ID NO: 6042 - DNA, 2182 bp, Homo sapiens
gggaggcagaggaggcggaggcagaggcagaggcagaggcagagcccgagcccggtgccgagaccaagcgacagaccggcggggctgggcctcgcaaagccggctcggcgagctctcccgacacccgagccggggaggaaaagcagcgactcctcgctcgcatccccgggagccgcactccagactggcccggtagtcaggggctcaggagcagatcccgaggcaggctttgctcagcctccgacgagggctggccctttggaaggcgccttcaacagccggaccagacaggccaccatgaccgagaattccacgtccgcccctgcggccaagcccaagcgggccaaggcctccaagaagtccacagaccaccccaagtattcagacatgatcgtggctgccatccaggccgagaagaaccgcgctggctcctcgcgccagtccattcagaagtatatcaagagccactacaaggtgggtgagaacgctgactcgcagatcaagttgtccatcaagcgcctggtcaccaccggtgtcctcaagcagaccaaaggggtgggggcctcggggtccttccggctagccaagagcgacgaacccaagaagtcagtggccttcaagaagaccaagaaggaaatcaagaaggtagccacgccaaagaaggcatccaagcccaagaaggctgcctccaaagccccaaccaagaaacccaaagccaccccggtcaagaaggccaagaagaagctggctgccacgcccaagaaagccaaaaaacccaagactgtcaaagccaagccggtcaaggcatccaagcccaaaaaggccaaaccagtgaaacccaaagcaaagtccagtgccaagagggccggcaagaagaagtgacaatgaagtcttttcttgcggacactccctcctgtctcctattttctgtaaataattttctccttttttctctcttgatgctcaccaccaccttttgcccccttctgttctgactttataagagacaggatttggattcttcagaaattacagaataattcatttttccttaaccagttgtgcaaggacagcaacaaccaatctaatgatgagaatgtacttatattttgttttgctattaacctacttacggggttagggatttgcggggggggcttgtgtgttttgttggcttgtttgccatgaaggtagatgtgggtggggagaagacacaaggcagtttgttctggctagatgagagggaacccaggaattgtgaggttagcaggaatatctttagggtgagtgagttttctttgagttgggcacccgttgtgagagtttcagaacctttggccagcaggagagaggtggtagggagcagccagccggcaaaggaaggagggggaaaaaaaccgccaccgggctgacttccacctcccagtggtgagcagtgggggcccaaacccagtttccttctcatttttgttagtttgcgctttcggcctccctattttcttagggaaggggagtggggtccaagtgacagctggatgggagaagccatagtttctcccagtcagctaggatgtagccattgggggatctttgtggcttcagcaaattctcttgttaaaccggagtgaaaacttcaggggaagggtggggagtcagccaagtgcctcagtgtgccctgttgaaacttaggtttttccacgcaatcgatggattgtgtcctaggaagacttttcttttcctctggatttttgttcctcctgtacaagaggtgtctttgcttggtttggtggggctgcggccacttaaaacctcccgatctctttttgagtcctttattataagtagttgtagctgcgggagggggagggggagtgggcgggcagtggatagtaagacttactgcagtcgatttgggatttgctaagtagttttacagagctagatctgtgtgcatgtgtgtgtttgtgtatatatacatatctagggctagtacttagtttcacacccgggagctgggagaaaaaacctgtacagttgtctttctcttatttttaataaaatagaaaaatcgcgcacttgcgcgtcccccccccacccccttttttaaacaagtgttacttgtgccgggaaaattttgctgtctttgtaattttaaaactttaaaataaattggaaaagggag

SEQ ID NO: 6043 - DNA, 507 bp, Homo sapiens
atgaccgagaattccacgtccgcccctgcggccaagcccaagcgggccaaggcctccaagaagtccacagaccaccccaagtattcagacatgatcgtggctgccatccaggccgagaagaaccgcgctggctcctcgcgccagtccattcagaagtatatcaagagccactacaaggtgggtgagaacgctgactcgcagatcaagttgtccatcaagcgcctggtcaccaccggtgtcctcaagcagaccaaaggggtgggggcctcggggtccttccggctagccaagagcgacgaacccaagaagtcagtggccttcaagaagaccaagaaggaaatcaagaaggtagccacgccaaagaaggcatccaagcccaagaaggctgcctccaaagccccaaccaagaaacccaaagccacccttttttaaacaagtgttacttgtgccgggaaaattttgctgtctttgtaattttaaaactttaaaataaattggaaaagggag

SEQ ID NO: 6044 - protein, 143 aa, Homo sapiens
MTENSTSAPAAKPKRAKASKKSTDHPKYSDMIVAAIQAEKNRAGSSRQSIQKYIKSHYKVGENADSQIKLSIKRLVTTGVLKQTKGVGASGSFRLAKSDEPKKSVAFKKTKKEIKKVATPKKASKPKKAASKAPTKKPKATLF

SEQ ID NO: 6045 - DNA, 1901 bp, Homo sapiens
gtctttccggcggtgctcgcaagcgaggcagccatgtcttatcccgctgatgattatgagtctgaggcggcttatgacccctacgcttatcccagcgactatgatatgcacacaggagatccaaagcaggaccttgcttatgaacgtcagtatgaacagcaaacctatcaggtgatccctgaggtgatcaaaaacttcatccagtatttccacaaaactgtctcagatttgattgaccagaaagtgtatgagctacaggccagtcgtgtctccagtgatgtcattgaccagaaggtgtatgagatccaggacatctatgagaacagctggaccaagctgactgaaagattcttcaagaatacaccttggcccgaggctgaagccattgctccacaggttggcaatgatgctgtcttcctgattttatacaaagaattatactacaggcacatatatgccaaagtcagtgggggaccttccttggagcagaggtttgaatcctattacaactactgcaatctcttcaactacattcttaatgccgatggtcctgctccccttgaactacccaaccagtggctctgggatattatcgatgagttcatctaccagtttcagtcattcagtcagtaccgctgtaagactgccaagaagtcagaggaggagattgactttcttcgttccaatcccaaaatctggaatgttcatagtgtcctcaatgtccttcattccctggtagacaaatccaacatcaaccgacagttggaggtatacacaagcggaggtgaccctgagagtgtggctggggagtatgggcggcactccctctacaaaatgcttggttacttcagcctggtcgggcttctccgcctgcactccctgttaggagattactaccaggccatcaaggtgctggagaacatcgaactgaacaagaagagtatgtattcccgtgtgccagagtgccaggtcaccacatactattatgttgggtttgcatatttgatgatgcgtcgttaccaggatgccatccgggtcttcgccaacatcctcctctacatccagaggaccaagagcatgttccagaggaccacgtacaagtatgagatgattaacaagcagaatgagcagatgcatgcgctgctggccattgccctcacgatgtaccccatgcgtatcgatgagagcattcacctccagctgcgggagaaatatggggacaagatgttgcgcatgcagaaaggtgacccacaagtctatgaagaacttttcagttactcctgccccaagttcctgtcgcctgtagtgcccaactatgataatgtgcaccccaactaccacaaagagcccttcctgcagcagctgaaggtgttttctgatgaagtacagcagcaggcccagctttcaaccatccgcagcttcctgaagctctacaccaccatgcctgtggccaagctggctggcttcctggacctcacagagcaggagttccggatccagcttcttgtcttcaaacacaagatgaagaacctcgtgtggaccagcggtatctcagccctggatggtgaatttcagtcagcctcagaggttgacttctacattgataaggacatgatccacatcgcggacaccaaggtcgccaggcgttatggggatttcttcatccgtcagatccacaaatttgaggagcttaatcgaaccctgaagaagatgggacagagaccttgatgatattcacacacattcaggaacctgttttgatgtattataggcaggaagtgtttttgctaccgtgaaacctttacctagatcagccatcagcctgtcaactcagttaacaagttaaggaccgaagtgtttcaagtggatctcagtaaaggatctttggagccagaaaaaaa

SEQ ID NO: 6046 - protein, 564 aa, Homo sapiens
MSYPADDYESEAAYDPYAYPSDYDMHTGDPKQDLAYERQYEQQTYQVIPEVIKNFIQYFHKTVSDLIDQKVYELQASRVSSDVIDQKVYEIQDIYENSWTKLTERFFKNTPWPEAEAIAPQVGNDAVFLILYKELYYRHIYAKVSGGPSLEQRFESYYNYCNLFNYILNADGPAPLELPNQWLWDIIDEFIYQFQSFSQYRCKTAKKSEEEIDFLRSNPKIWNVHSVLNVLHSLVDKSNINRQLEVYTSGGDPESVAGEYGRHSLYKMLGYFSLVGLLRLHSLLGDYYQAIKVLENIELNKKSMYSRVPECQVTTYYYVGFAYLMMRRYQDAIRVFANILLYIQRTKSMFQRTTYKYEMINKQNEQMHALLAIALTMYPMRIDESIHLQLREKYGDKMLRMQKGDPQVYEELFSYSCPKFLSPVVPNYDNVHPNYHKEPFLQQLKVFSDEVQQQAQLSTIRSFLKLYTTMPVAKLAGFLDLTEQEFRIQLLVFKHKMKNLVWTSGISALDGEFQSASEVDFYIDKDMIHIADTKVARRYGDFFIRQIHKFEELNRTLKKMGQRP

SEQ ID NO: 6047 - DNA, 5411 bp, Homo sapiens
ggccaagccggggccccgaagccagagccggagccgggcgggccgcggggtcatggctgggccgcggggcgcgctgctggcctggtgccgccgccagtgcgagggctaccgcggcgtggagatccgcgacctgagcagctccttccgggacggcctggccttctgcgccatcctgcaccggcaccggcccgacctgctagattttgattcgctttccaaggacaatgtcttcgagaataaccgtttggcctttgaagtggctgagaaggagctggggatccccgctctcctggaccccaatgacatggtctccatgagcgtccctgactgcctcagcatcatgacctatgtgtcccagtattacaaccacttctgcagtcctggccaagctggtgtctcgccacccagaaagggccttgcaccctgttccccgccgtctgtagcacccactccagtggaaccagaagatgtggctcagggcgaggagctctcctcaggcagcctgtcagagcagggcaccggccagacccccagcagcacgtgcgcagcctgccagcagcatgtgcacttggtgcagcgctacctggctgacggcaggctgtaccatcgccactgcttccggtgtcggcggtgctccagcaccctgctccctggggcttatgagaatgggcctgaggagggcacctttgtgtgtgcagaacactgtgccaggctgggcccggggacacggtcggggaccaggcctgggcccttctcacagccaaagcagcagcaccagcagcaactcgcagaagatgccaaggatgttccaggaggcggccccagctccagtgctcctgcaggggctgaggccgatggacccaaggccagccctgaggcccggccgcagatccctaccaagccccgggttcctggcaaactacaggagctggccagcccccctgcgggccgccccacccctgcccccaggaaggcctctgagagcaccaccccagcaccccccacgccccggccccgctccagtctgcagcaggagaacctggtggagcaggctggcagcagcagcctggtgaacgggagactgcacgaactgcctgtccccaagccgagggggacaccgaagccgtccgaggggacaccagcccccaggaaggaccccccatggatcacgctggtgcaggcagaaccaaagaagaagccagccccacttcccccaagcagcagcccggggccaccaagccaggacagcaggcaggtggagaatggaggcaccgaggaggtggcccagccgagcccaacggccagcctggagtccaaaccctataacccctttgaggaggaggaggaggacaaggaggaagaggctccagctgcacccagcctggccaccagccctgccctgggccacccggagtccacacccaagtccctgcacccctggtacggcatcacccctaccagcagccccaagacaaagaagcgccctgccccgcgcgcacccagcgcgtccccactggctctccacgcctcccgcctctcgcactcggagccgccctcggccacaccatcgccagcgctcagcgtggagagcctgtcgtctgagagcgccagccagactgcaggtgcagagcttctggagccgccagctgtgcccaagagctcctcagagcctgctgtccatgcccctggtacccctggaaaccctgtcagcctctctaccaactcctccctggcctcctctggggaactagtggagcctagagtggaacaaatgcctcaagccagccctggccttgcccccaggaccaggggcagctcaggtccccagccagccaagccctgcagtggcgccaccccaacgcctctcttgttggttggagacaggagcccggtgccttcccctggaagctcgtccccacagctgcaggtaaagtcctcctgcaaggagaatccttttaaccggaagccatcacctgcagcgtccccagccacaaagaaggccaccaagggatccaagccagtgaggccacctgcccctggacacggctttccactcatcaaacgcaaggtccaggctgaccagtacatccctgaggaggacatccatggagagatggataccattgagcgccggctggatgccctggagcaccgtggggtgctgctggaggagaagctgcgtggcggcctgaatgagggccgtgaggatgacatgctggtggactggttcaagctcatccacgagaagcacctactggtgcggcgagagtccgagctcatctatgtcttcaagcagcagaacctggagcagcgccaggctgatgtcgagtatgagctccggtgcctcctcaataagccagaaaaggactggacggaggaggaccgggcccgggagaaggtgctgatgcaggagcttgtgaccctcattgagcagcgcaacgctatcatcaactgcctggatgaggaccggcagagggaggaagaggaagacaagatgttggaagccatgatcaagaagaaagagttccagagggaggctgaacctgagggcaagaagaaggggaagttcaagaccatgaagatgttgaaactgctaggaaacaaacgtgatgccaagagcaagtcccccagagacaagagctaacagcacgagaagccagttggggactgccccctcctggagcagctcctgggctgtgctctgtttgaagggggcgccctgctcccctcagatcagtcaggaggaagatgactaaggggagggatcctctgggtgatggcctcttcctcctcagggacctctgactgctctgggccaaagaatctcttgtttcttctccgagccccaggcagcggtgattcagccctgcccaacctgattctgatgactgcggatgctgtgacggacccaaggggcaaatagggtcccagggtccagggaggggcgcctgctgagcacttccgcccctcaccctgcccagcccctgccatgagctctgggctgggtctccgcctccagggttctgctcttccaggcaggccagcaagtggcgctgggccacactggcttcttcctgccccatccctggctctgagtctctgtcttcctgtcctgtgcaggcgcccttggatctcagtttccctcactcaggaactctgtttctgaagtcttcagttaagtttgagtttatgactgagtggcctgtactgtcagacgtgaatgggcctgacgggcaaatccatccctctctccctcacagttccaggagcggcttccctcgtctccccttactccacagggagcctcccttgccaggaccagggctgcgacggccatgctggggcaggtgagtgctctgttagctgctcccagtgctgtccccaggctgcagttctggtccctggttgtcaggtaggaagggtgcacttgaagcaggtgctcatctcggttccttaacgtttatagtctgacccctcacttaggctttcctctgccaccccggtccagggaagaggctcgctcccgcccatggtcatcactggtctgtctgctctgttgtctgttctttccctgactccctcccaccgaaggcctgatggctactcacccctctgggatggctatgggagaggaggagtgatggggaccgccaccttttctgcaggaaatgtgcccagcagctcttggtcaaagcactgttgctataagctatctctgggatgcctctaggcccccttccctctacacacctctgggaaaagattacactgtattaactctcgaggagtttcctcaccaataaacagacaacctcaactgccagtgccctgcagcctcgggccacagcggcagccttgtttgccttcccacctgcctctgccacacctggtggctgaacatctctggtcgcccagaggccatgttggggccatcctccaagagggatctctgccctcaccgcctgccactgggcaggatccctttcctctgcagggagaggtggctcctcggccatgcagcccctggcaggctccttctaaacatgcctgttgacctggagctggcgccaccaactccagggcctttccagggccagacaggtaacacgcatgaacccgagtgacagctctgacgggctgtttcggtgtcaggagacaaagctggcaggggcaggggtgaactggaggcaagtcaagtcacctgtggcctgtggggctgaatgtgggcccggtgttgccagatcctttgtcataagaagctagaaatccagattttatgtgtgtgtaatttgtaaatgctgaaagctagcctgaattttttttttttttttttgagacagagtctcgctctgtcgcccaggctggagtgcagtggcgcgatctcagctcactgcaagctccgcctcctgggttcacgccatcctcctgcctcggcctcctgagcagctgggactacaggcgcatgctacgacgcctggctaattttttgtatttttagtagagacggggtttcaccgtgttaaccaggatggtctcgatctcctgaccttgtgatccacccaccttggcctcccaaagtgctgggattacaggcgtgagccaccacgcccggccactagcctgaatttcaatcaagggttggctgatactgtgtgtccagggtggactggatttgtcctggggggttctctggtttgctgcctcctgaccacatgatggggccttcgaggtcgaggacaactgttcccattagattgcaccctctgccctcaggttcttgagggtgtgtggacacagaggctttccatgggatgtccctgagccggcccttgattggggcctcaccatttacagggccgttttattctgcaaaccgaaacttgggtcatgtgacctgatgggattatgggactccctccaggtgcccgagacaaggttgatatttccaaaatattttggtgatttagtgggacaagcaaatgacagaataccggagaaggcagggatcgtgggtgtcaggagccagaggggagggggacagatgtgctgtgtacaggacaaggtgtcaggtgactccttcccagcagggcctcgcagatgcacaagcacggagctggtgggttttgcccaagaaaggtcacgcggcacatgcagggattggaactcccaggccagggctctaggtcgctcccaccttttcatgtttctttctgtggccatgggtatagtggaaagacataaagctaaagccaacttttaatcctgaatgcactgcttgccaggtaaatgcccttggttgtggtatcttgttgagacttagttttcacagagggataatgaaccgttgcagaggtttattgagatcattaacagagtggaattcagcacccgccacagcagccagccatggg

SEQ ID NO: 6048 - protein, 863 aa, Homo sapiens
MAGPRGALLAWCRRQCEGYRGVEIRDLSSSFRDGLAFCAILHRHRPDLLDFDSLSKDNVFENNRLAFEVAEKELGIPALLDPNDMVSMSVPDCLSIMTYVSQYYNHFCSPGQAGVSPPRKGLAPCSPPSVAPTPVEPEDVAQGEELSSGSLSEQGTGQTPSSTCAACQQHVHLVQRYLADGRLYHRHCFRCRRCSSTLLPGAYENGPEEGTFVCAEHCARLGPGTRSGTRPGPFSQPKQQHQQQLAEDAKDVPGGGPSSSAPAGAEADGPKASPEARPQIPTKPRVPGKLQELASPPAGRPTPAPRKASESTTPAPPTPRPRSSLQQENLVEQAGSSSLVNGRLHELPVPKPRGTPKPSEGTPAPRKDPPWITLVQAEPKKKPAPLPPSSSPGPPSQDSRQVENGGTEEVAQPSPTASLESKPYNPFEEEEEDKEEEAPAAPSLATSPALGHPESTPKSLHPWYGITPTSSPKTKKRPAPRAPSASPLALHASRLSHSEPPSATPSPALSVESLSSESASQTAGAELLEPPAVPKSSSEPAVHAPGTPGNPVSLSTNSSLASSGELVEPRVEQMPQASPGLAPRTRGSSGPQPAKPCSGATPTPLLLVGDRSPVPSPGSSSPQLQVKSSCKENPFNRKPSPAASPATKKATKGSKPVRPPAPGHGFPLIKRKVQADQYIPEEDIHGEMDTIERRLDALEHRGVLLEEKLRGGLNEGREDDMLVDWFKLIHEKHLLVRRESELIYVFKQQNLEQRQADVEYELRCLLNKPEKDWTEEDRAREKVLMQELVTLIEQRNAIINCLDEDRQREEEEDKMLEAMIKKKEFQREAEPEGKKKGKFKTMKMLKLLGNKRDAKSKSPRDKS

SEQ ID NO: 6049 - DNA, 2882 bp, Homo sapiens
gtccggccagggtggttggtggtaaggattcaggctccgtcctaacgaggccgtggcctgaggctcagggccccccgcccctccctcccagcccaccagcgtcacctcccagccccgagctggaccgcacaccttgggacacggttttccacttcctaaggacgagccccagactggaggagaggtccgaggaggtgggcgttggactctttgcgaggaccccggcggctggcccgggggaggcggccgaggcggcggcggcggcggccgggggcgacatggcggaggagcaggacctatcggaggtggagctgagccccgtgggctcggaggagccccgctgcctgtccccggggagcgcgccctcgctagggcccgacggcggcggcggcggatcgggcctgcgagccagcccggggccaggcgagctgggcaaggtcaagaaggagcagcaggacggcgaggcggacgatgacaagttccccgtgtgcatccgcgaggccgtcagccaggtgctcagcggctacgactggacgctggtgcccatgcccgtgcgcgtcaacggcgccagcaaaagcaagccgcacgtcaagcggcccatgaacgccttcatggtgtgggctcaggcagcgcgcaggaagctcgcggaccagtacccgcacctgcacaacgctgagctcagcaagacgctgggcaagctctggaggctgctgaacgaaagtgacaagcgccccttcatcgaggaggctgagcggctccgtatgcagcacaagaaagaccacccggactacaagtaccagcccaggcggcggaagaacgggaaggccgcccagggcgaggcggagtgccccggtggggaggccgagcaaggtgggaccgccgccatccaggcccactacaagagcgcccacttggaccaccggcacccaggagagggctcccccatgtcagatggtaaccccgagcacccctcaggccagagccatggcccacccacccctccaaccaccccgaagacagagctgcagtcgggcaaggcagacccgaagcgggacgggcgctccatgggggagggcgggaagcctcacatcgacttcggcaacgtggacattggtgagatcagccacgaggtaatgtccaacatggagacctttgatgtggctgagttggaccagtacctgccgcccaatgggcacccaggccatgtgagcagctactcagcagccggctatgggctgggcagtgccctggccgtggccagtggacactccgcctggatctccaagccaccaggcgtggctctgcccacggtctcaccacctggtgtggatgccaaagcccaggtgaagacagagaccgcggggccccaggggcccccacactacaccgaccagccatccacctcacagatcgcctacacctccctcagcctgccccactatggctcagccttcccctccatctcccgcccccagtttgactactctgaccatcagccctcaggaccctattatggccactcgggccaggcctctggcctctactcggccttctcctatatggggccctcgcagcggcccctctacacggccatctctgaccccagcccctcagggccccagtcccacagccccacacactgggagcagccagtatatacgacactgtcccggccctaaagggggccctgtcgccaccaccccccgcccagcccctgcccccagcctgtgtgccctgttccttgcccacctcaggcctggtggtggcagtggaggaggctgaggaggctgaagaggctgacaggtcggggggctttctgtctggctcactgccctgatgacccacccgccccatccaggctccagcagcaaagccccaggagaacaggctggacagaggagaaggaggttgactgttgcacccacactgaaagatgaggggctgcaccttcccccaggaatgaccctctatcccaggacctgagaagggcctgctcaccctcctcggggaggggaagcaccagggttggtggcatcggaggccttaccactcctatgactcctgttttctctctcacagatagtgagggtctgacatgcccatgccacctatgccacagtgcctaagggctaggccacccagagactgtgcccggagctggccgtgtctcccactcaggggctgagagtagctttgaggagcctcattggggagtggggggttcgagggacttagtggagttctcatcccttcaatgccccctccctttctgaaggcaggaaggagttggcacagaggccccctgatccaattctgtgccaataacctcattctttgtctgagaaacagcccccagtcctcctccactacaacctccatgaccttgagacgcatcccaggaggtgacgaggcaggggctccaggaaaggaatcagagacaattcacagagcctccctccctgggctccttgccagctccctcttcccttactaggctctatggcccctgctcagtcagccccactccctgggcttcccagagagtgacagctgctcaggccctaacccttggctccaggagacacagggcccagcacccaggttgctgtcggcaggctgaagacactagaatcctgacctgtacattctgcccttgcctcttaccccttgcctcccagtggtatttgaataaagtatgtagctatatctgcccctattttcctgttctgcagccccccaaatccacatgtaactcattactgtctcctgttatttatctcagtagtcccctctcctagccactctagcccctattaactctgcattaagcattccacataataaaattaaaggttccggttaaaaaaaaaaaaaaaaaaaaa

SEQ ID NO: 6050 - protein, 466 aa, Homo sapiens
MAEEQDLSEVELSPVGSEEPRCLSPGSAPSLGPDGGGGGSGLRASPGPGELGKVKKEQQDGEADDDKFPVCIREAVSQVLSGYDWTLVPMPVRVNGASKSKPHVKRPMNAFMVWAQAARRKLADQYPHLHNAELSKTLGKLWRLLNESDKRPFIEEAERLRMQHKKDHPDYKYQPRRRKNGKAAQGEAECPGGEAEQGGTAAIQAHYKSAHLDHRHPGEGSPMSDGNPEHPSGQSHGPPTPPTTPKTELQSGKADPKRDGRSMGEGGKPHIDFGNVDIGEISHEVMSNMETFDVAELDQYLPPNGHPGHVSSYSAAGYGLGSALAVASGHSAWISKPPGVALPTVSPPGVDAKAQVKTETAGPQGPPHYTDQPSTSQIAYTSLSLPHYGSAFPSISRPQFDYSDHQPSGPYYGHSGQASGLYSAFSYMGPSQRPLYTAISDPSPSGPQSHSPTHWEQPVYTTLSRP

SEQ ID NO: 6051 - DNA, 3222 bp, Homo sapiens
ctgggggtccgttccccaacttcctcggcgctccggactcccaagtctccgccggaccctcctttggatattcctcgtgtctccgattctgagagagggggaagacggtggggcctccccacctgccccgcagaagatgcagttctttggccgcctggtcaataccttcagtggcgtcaccaacttgttctctaacccattccgggtgaaggaggtggctgtggccgactacacctcgagtgaccgagttcgggaggaagggcagctgattctgttccagaacactcccaaccgcacctgggactgcgtcctggtcaaccccaggaactcacagagtggattccgactcttccagctggagttggaggctgacgccctagtgaatttccatcagtattcttcccagctgctacccttctatgagagctcccctcaggtcctgcacactgaggtcctgcagcacctgaccgacctcatccgtaaccaccccagctggtcagtggcccacctggctgtggagctagggatccgcgagtgcttccatcacagccgtatcatcagctgtgccaattgcgcggagaacgaggagggctgcacacccctgcacctggcctgccgcaagggtgatggggagatcctggtggagctggtgcagtactgccacactcagatggatgtcaccgactacaagggagagaccgtcttccattatgctgtccagggtgacaattctcaggtgctgcagctccttggaaggaacgcagtggctggcctgaaccaggtgaataaccaagggctgaccccgctgcacctggcctgccagctggggaagcaggagatggtccgcgtgctgctgctgtgcaatgctcggtgcaacatcatgggccccaacggctaccccatccactcggccatgaagttctctcagaaggggtgtgcggagatgatcatcagcatggacagcagccagatccacagcaaagacccccgttacggagccagccccctccactgggccaagaacgcagagatggcccgcatgctgctgaaacggggctgcaacgtgaacagcaccagctccgcggggaacacggccctgcacgtggcggtgatgcgcaaccgcttcgactgtgccatagtgctgctgacccacggggccaacgcggatgcccgcggagagcacggcaacaccccgctgcacctggccatgtcgaaagacaacgtggagatgatcaaggccctcatcgtgttcggagcagaagtggacaccccgaatgactttggggagactcctacattcctagcctccaaaatcggcagacttgtcaccaggaaggcgatcttgactctgctgagaaccgtgggggccgaatactgcttcccacccatccacggggtccccgcggagcagggctctgcagcgccacatcatcccttctccctggaaagagctcagcccccaccgatcagcctaaacaacctagaactacaggatctcatgcacatctcacgggcccggaagccagcgttcatcctgggctccatgagggacgagaagcggacccacgaccacctgctgtgcctggatggaggaggagtgaaaggcctcatcatcatccagctcctcatcgccatcgagaaggcctcgggtgtggccaccaaggacctgtttgactgggtggcgggcaccagcactggaggcatcctggccctggccattctgcacagtaagtccatggcctacatgcgcggcatgtactttcgcatgaaggatgaggtgttccggggctccaggccctacgagtcggggcccctggaggagttcctgaagcgggagtttggggagcacaccaagatgacggacgtcaggaaacccaaggtgatgctgacagggacactgtctgaccggcagccggctgaactccacctcttccggaactacgatgctccagaaactgtccgggagcctcgtttcaaccagaacgttaacctcaggcctccagctcagccctcagaccagctggtgtggcgggcggcccgaagcagcggggcagctcctacttacttccgacccaatgggcgcttcctggacggtgggctgctggccaacaaccccacgctggatgccatgaccgagatccatgagtacaatcaggacctgatccgcaagggtcaggccaacaaggtgaagaaactctccatcgttgtctccctggggacagggaggtccccacaagtgcctgtgacctgtgtggatgtcttccgtcccagcaacccctgggagctggccaagactgtttttggggccaaggaactgggcaagatggtggtggactgttgcacggatccagacgggcgggctgtggaccgggcacgggcctggtgcgagatggtcggcatccagtacttcagattgaacccccagctggggacggacatcatgctggatgaggtcagtgacacagtgctggtcaacgccctctgggagaccgaggtctacatctatgagcaccgcgaggagttccagaagctcatccagctgctgctctcaccctgagggtccccagcctctcaccggccccagctgacctcgtccattcagcccctgccaggccaagcccagccactgccctcccgggcagatctgggcccaggcacctctgagtccatagaccaggcctgggagaatgccaagctgcctgcccgaggctggtcctgaaggcctgtctcccactaaccccgccttccagcactttctgtcattccaggctgggaaagtctagagccccctttggcccctttccctgactgtcaaggacaactgactcccccatcagctcaaacattaagggtacccgggcacaaccgtacccctgcccccagccccagcctccctgagggcctgccgggctgcctctgccccagcccccagcaagggcactcccaggcttcctggtgggtgcagcccactccctctgccctctgctccgttccctgggggctgggactaaagaaatgggtgtcccccaccccatcagctgggaaagcccaggccgcaggagtgggatgcccgttggactttgcccctcacactggcccagcccctcacactgccccaccccgagaaccctcagctctcaaaggtcactcctgggagtttcttcttcccaatggaagtggcttaagagccaaaactgaaataaatcatttggattcaagttc

SEQ ID NO: 6052 - DNA, 2357 bp, Homo sapiens
cttacaactccgcgcggcctcggccccctgcgccgcccgccccacaacaaaactcagcgcagcgctcccgggcgcccggttcagagcgacctgcggctcagagcggaggggagactgaccggagcgcggatcgggacagcggccgggacagcggcgagacgcgcgtgtgtgagcgcgccggaccaagcgggcccagaagcgggtctgcagcccagagggcaccttctgcaaacatgtctgtggatcccctatccagcaaagctctaaagatcaagcgagagctgagcgagaacacgccgcacctgtcggacgaggcgctgatggggctgtcggtgcgcgagctgaaccggcatctgcgcgggctctccgccgaggaggtgacacggctcaagcagcggcgccgcacactcaaaaaccgtggctacgccgccagctgccgcgtgaagcgcgtgtgccagaaggaggagctgcagaagcagaagtcggagctggagcgcgaggtggacaagctggcgcgcgagaacgccgccatgcgcctggagctcgacgcgctgcgcggcaagtgcgaggcgctgcagggcttcgcgcgctccgtggccgccgcccgcgggcccgccacgctcgtggcgccggccagcgtcatcaccatcgtcaagtccaccccgggctcggggtctggccccgcccacggcccggaccccgcccacggcccggcctcctgctcctagtgcccgcccccgccatgcctcagccacgcccctccggcctcagctccctccccaaagtgcctgagcgccgcctctgtgcccaggtcccatttctctgcagcactggccccttggtgcacacacattcccttcgtgggccctgtcttcctcttgcagccccccaaactgggaccgaatgaccctgggaaggggaagttgggtaggttggggatggggcagaggtctggatctgggatcgcccttggctgaaagtttagcctttttagattgagagatacagagccggcttagagaacagctgttgggggagaagagggcacccctcatcttggaaactgctcttattgtgccaatatgccctccaaaccctcccaggattcaaagctaggtttggctgtctgtgacttacgggaccgtcctgctgagaaattgcactgaagagatgcccccacctctggttgggcctgggggtgcctggccttccgaaactaaaagagtgggtgggaagactagtgaaacccagttcacggatggggaaacaggcctgaggtcacatttcacttagtggttgtgttgggaccaaaacctgggtgtcctcactgctgagtccagccatggttttcagggggacagtggacagggactcagaaatgtggtgggagggcctccctggcttgggagaccgctctctgcaagggagggggagagaagcagagggagagagaaggtgacacggatggaagagtgggaaggagctggcctggctcagccctaggctgtccctgcagccagggtgtccgggggctggccagtcagagaaagggggccatggactgctgtggcaaatagggagacaaggagacagaccctgcagtcctactacagtctggagtggggtcctaagaagaagggtcccacctcaacccctgtcagtgtccactgtggggtgggggctgacccctgcctttgattgtcattctcctgggaagcccagtctcagtccctcccccaacactgtccacactgcccctccccactgtttatttattgcacggatctaagttattctccccagccagagcccgagctcctgctccctgggaaaagtggcgtatggccctgagctgggctttatattatatatctgcaaataaatcacattttatcttatatttagggaaagccggagagcaacaacaaaaaatgtttaagccgggcgcggtggctcacatctgtaatcccagcactttgggagtccaaggagggggatcgcttgagtccaggagtttgagaccagcctggacaacatggtgaaaccccgtctctacaaaaaatacaaaaattagccatgcatggtggctcatgcctgtagtcccagctacttgggaggctgaggcaggaggatcacttaagcccagaaggcagaggttgtagtgagctgagatcgcaccactgcactccagcctgggcaacatagcaaaatcctgtctcaaaaaaaaagttaaaaaatattgcccggctcctagaatttatttatttcctgacttacagcaagcgagttatcgtcttctgtattttgtagactttctaaataaagtcaaattctttctttttccacagaaaaaaaaa

SEQ ID NO: 6053 - protein, 164 aa, Homo sapiens
MSVDPLSSKALKIKRELSENTPHLSDEALMGLSVRELNRHLRGLSAEEVTRLKQRRRTLKNRGYAASCRVKRVCQKEELQKQKSELEREVDKLARENAAMRLELDALRGKCEALQGFARSVAAARGPATLVAPASVITIVKSTPGSGSGPAHGPDPAHGPASCS

SEQ ID NO: 6054 - DNA, 3578 bp, Homo sapiens
cgccggcggcggcggagactccggggctgcggcgccgcccgccccgcccgcagagtccggctgccgcgcatcgtccgcagacgccgccaccgccatgggctcctgaggctagcttgtcactttctgcaaaggtttccctcagggagcctcctgctgccaggcaccatgacagtgaggggggatgtgctggccccggatccagcgtcgcccacgaccgcagcagcctcgcccagcgtctccgtgatccccgagggcagccccactgccatggagcagcctgtgttcctgatgacaactgccgctcaggccatctctggcttcttcgtgtggacggccctgctcatcacatgccaccagatctacatgcacctgcgctgctacagctgccccaacgagcagcgctacatcgtgcgcatcctcttcatcgtgcccatctacgcctttgactcctggctcagcctcctcttcttcaccaacgaccagtactacgtgtacttcggcaccgtccgcgactgctatgaggccttggtcatctataatttcctgagcctgtgctatgagtacctaggaggagaaagttccatcatgtcggagatcagaggaaaacccattgagtccagctgtatgtatggcacctgctgcctctggggaaagacttattccatcggatttctgaggttctgcaaacaggccaccctgcagttctgtgtggtgaagccactcatggcggtcagcactgtggtcctccaggccttcggcaagtaccgggatggggactttgacgtcaccagtggctacctctacgtgaccatcatctacaacatctccgtcagcctggccctctacgccctcttcctcttctacttcgccacccgggagctgctcagcccctacagccccgtcctcaagttcttcatggtcaagtccgtcatctttctttccttctggcaaggcatgctcctggccatcctggagaagtgtggggccatccccaaaatccactcggcccgcgtgtcggtgggcgagggcaccgtggctgccggctaccaggacttcatcatctgtgtggagatgttctttgcagccctggccctgcggcacgccttcacctacaaggtctatgctgacaagaggctggacgcacaaggccgctgtgcccccatgaagagcatctccagcagcctcaaggagaccatgaacccgcacgacatcgtgcaggacgccatccacaacttctcacctgcctaccagcagtacacgcagcagtccaccctggagcctgggcccacctggcgtggtggcgcccacggcctctcccgctcccacagcctcagtggcgcccgcgacaacgagaagactctcctgctcagctctgatgatgaattctaggtgcgggctgcagtggcggaagtgctggcgccatagccacggtcaggctgtgccccacctccagcctcaccaccaggccaggaggcagctggcacagtgctcacgccgcctttatttattggaccagaaacactcacatgtcacttccagaggaacgggggacagccaggctcgcccatgggccttcaggaatatttatacatggcccagcctgcactgcccgggcgagggcagaggacactgggagcaaggcttatgcccctgctgcccgtcctgtgctgggggcatgctgggaccagccgcacccaggccccaatgcttgtgtgtggaccagcggctgcagccttctagcccctcctccccgcgagactctcaggctgaggtcggcaagccgtggctcccccacacaccgtgcaataccctgtctgacctgggctcttcccgcctgcatccctcccctgtccacctttgtccagtgctagattcacctcaccccgggcaggagtggggatgtgggcgctctgtggtcctcccctcctgacccaggcctctgtggcatgctgcaaggatcagagccagacaccaggagtcacaggccccacccaggaagggcattcagggcccctgggcaccgcttctgttgaagcaggggcttctgggcccctgggtatccccacctgtcgtggccacacctctgcctgcctcatgccccttccccctggcctaccaaggacagcccacagcccgcactgccggctcacttgggtccttcctcgatagctttgggcagagcccttgcttcctggctgcttcagggctcaggggctcccagccctccttcccaggctgatgctgggtcctctctctctttggggcttctccctcccgtttcaggggaaaggtctgagtctccacgtttcagaccagcttctgggggaaggcagtccggcagggagaccgggaggggtggccacacagtggggagctgggaggtggggggaatggtcccagactcctctcggggcccctatccacacagggcctggtgttctaccccatctggcccctggcccatctcttctgtgccttagtcacatatgaaagcgcccctccctggctccccatctgtcccacacgctccctggggctcttagttcagctgctggcactcgcaggatcctgcagtgctgggcccagagcccttggacaggcctcaggagtggtcaggaccaccaagcccctcctctccccctccacacctctagacctggggcctccggaacccccagcaggctgggcttatactagctcctgacttaggaagagcctcgtgtcacaacacgtgtccctacaggcaaagtgtcctggcatttaaaacccagattatccctgggtttgggctgcagtcacctggagaagctggtagggtaagggagagggaccctgccggtgttcactggggattctttcttttggtccttcctggaatgaacaggttccctccctgccacctgtgaggagagttggggcccagccgtcttcctggcctccttcctttcctcgtggcagaggcctgcatgtgggtgccagaggccagctctccccctccatcttgggggggcggagcagttgggcccaagctgcccgggagggtgggtgcagacacaggctgaggaccagccctggccctgccccgccatctgctttcaccaagctgtctctccaccgtggcttcccttctccctccaggccaaagtgctgctgattcccactcccttggttttcgcctgcccagcgttgctgtttgcgtggagggtggggggagctcagtggcagggaatcagcggtccgtggggtcgtggggacgggaacatgtgcccgaccgctccatcccctcctcctccttaggatgcataacctaccttgtctttttttttttaaattttctttccaggtagagtagctctttgtacataaagaatacttgaaaaattaattgtatgatgtatgagaagacagagtctcctagttttgtatcttgttgtatgactgccatgagttccaccagaaagccactctattttggtccctgtgacattttaaatgcgtgacagaagtgagcaaataaagtgaggaagaaatctatatatgagataatatagattgtattgaaaaaaaaaaaaaaaaaa

SEQ ID NO: 6055 - protein, 373 aa, Homo sapiens
MEQPVFLMTTAAQAISGFFVWTALLITCHQIYMHLRCYSCPNEQRYIVRILFIVPIYAFDSWLSLLFFTNDQYYVYFGTVRDCYEALVIYNFLSLCYEYLGGESSIMSEIRGKPIESSCMYGTCCLWGKTYSIGFLRFCKQATLQFCVVKPLMAVSTVVLQAFGKYRDGDFDVTSGYLYVTIIYNISVSLALYALFLFYFATRELLSPYSPVLKFFMVKSVIFLSFWQGMLLAILEKCGAIPKIHSARVSVGEGTVAAGYQDFIICVEMFFAALALRHAFTYKVYADKRLDAQGRCAPMKSISSSLKETMNPHDIVQDAIHNFSPAYQQYTQQSTLEPGPTWRGGAHGLSRSHSLSGARDNEKTLLLSSDDEF

SEQ ID NO: 6056 - DNA, 1194 bp, Homo sapiens
caaggtaactctgggctacagagtccttgctgggggttcggggagcgcttggaccccggcttctgggacgcgtcaggagaagggagcactggctttgctttcatcaggccaaagatgcctttctttgggaatacgttcagtccgaagaagacacctcctcggaagtcggcatctctctccaacctgcattctttggatcgatcaacccgggaggtggagctgggcttggaatacggatccccgactatgaacctggcagggcaaagcctgaagtttgaaaatggccagtggatagcagagacaggggttagtggcggtgtggaccggagggaggttcagcgccttcgcaggcggaaccagcagttggaggaagagaacaatctcttgcggctgaaagtggacatcttattagacatgctttcagagtccactgctgaatcccacttaatggagaaggaactggatgaactgaggatcagccggaagagaaaatgaagaccccagagacatttattggggagtaggatgtggctgagtgctttttttttggccagactagcggattcagtcctggaagagagtatcatataatgagacccacaggcactggcacccttgggttggcaatagaaggtgacatggaatggagaaaaccaagattccagatggggatagtaactagaaggtgcttcagatgcactgcctgcgggtgccagtctgaaaaccagaccgcacagaggcctggggctgctgatgagctttttggtgctctccacacacaagctcgcaaacacacatgtcccagaatagctctgttgggttgtgttgggagaagcggctggagttcattctctcacccccttatgttggtgtttggcgtgtgacagcagttctacagagctctgtgttggggtcatggatgagcggctctcttggctcttaaaggcaggcctctctcttcttgcctttaaagaatcctccttcctcacacctggcctcctctggcttcagcttctcagcagcaagcaccagccttccacaacaacactatatttttatgctactttcctgtttgcactactacttttttattaaacgatgttaaataaaaaaaaaaaaaaaaaaaaaaaaaaaaaaaaaaaaaaaaaaaaaaaaaaaaaaaaaaaaaaaaaaaaaaaaaaaaaaaaaaaaaaa

SEQ ID NO: 6057 - protein, 126 aa, Homo sapiens
MPFFGNTFSPKKTPPRKSASLSNLHSLDRSTREVELGLEYGSPTMNLAGQSLKFENGQWIAETGVSGGVDRREVQRLRRRNQQLEEENNLLRLKVDILLDMLSESTAESHLMEKELDELRISRKRK

SEQ ID NO: 6058 - DNA, 1101 bp, Homo sapiens
ggcacgaggcagtcatggctgccgccgtcgctgctgccggtgcaggggaaccccagtccccggacgaattgctcccgaaaggcgacgcggagaagcctgaggaggagctggaggaggacgacgatgaggagctagatgagaccctgtcggagagactatggggcctgacggagatgtttccggagagggtccggtccgcggccggagccacttttgatctttccctctttgtggctcagaaaatgtacaggttttccagggcagccttgtggattgggaccacttcctttatgatcctggttcttcccgttgtctttgagacggagaagttgcaaatggagcaacagcagcaactgcagcagcggcagatacttctaggacctaacacagggctctcaggaggaatgccaggggctctaccctcacttcctggaaagatctagattgttattgctgtttgagctgtctcagtgggataagtttgaaattcaagtgtttgaactgctgataatttggatttttttttttttaactttggcacattgatctatctaaacccggtggggagaattatccccacattgtctcatggaaagactcaacttgcaactgtgccctccacactatccttacttctgtctccactctgataccagagtgcagccatgcagacggttattccagctctggtcacccgactcctttcaccaaattgctcctaactggaagatctcactttccccttgtggggtaggaaccgatgccagtgggagggatgtgcccctgaccattaacgactgtttttttttttttttttaaagaatggagttgttggggcgggacatgcacacaatgtgaaacagacaaaatgcattacacctgtagtgtaaagtggccactatgaatccctatgtatgagaggagggaggcaggctgcagcttcagccacagaatggggactatggaagacagcaggagctcatttcctctgcacattttggctgttagacctgtgtgtgtgtttaaaaaaagagaagtcagtgctcactttttgtatttaaatattaaaaatgattccaactgaaaaaaaaaaaaaaaaaa

SEQ ID NO: 6059 - protein, 142 aa, Homo sapiens
MAAAVAAAGAGEPQSPDELLPKGDAEKPEEELEEDDDEELDETLSERLWGLTEMFPERVRSAAGATFDLSLFVAQKMYRFSRAALWIGTTSFMILVLPVVFETEKLQMEQQQQLQQRQILLGPNTGLSGGMPGALPSLPGKI

SEQ ID NO: 6060 - DNA, 1138 bp, Homo sapiens
actttaaagagggctgctcaactgcaaggacgctgtaagcaggaagagaagccacagcgcttcagaaaagagtgggacagggacaagcatatctaagaggctgaacatgaatccacagatcagaaacccgatgaaggcaatgtatccaggcacattctacttccaatttaaaaacctatgggaagccaacgatcggaacgaaacttggctgtgcttcaccgtggaaggtataaagcgccgctcagttgtctcctggaagacgggcgtcttccgaaaccaggtggattctgagacccattgtcatgcagaaaggtgcttcctctcttggttctgcgacgacatactgtctcctaacacaaagtaccaggtcacctggtacacatcttggagcccttgcccagactgtgcaggggaggtggccgagttcctggccaggcacagcaacgtgaatctcaccatcttcaccgcccgcctctactacttccagtatccatgttaccaggaggggctccgcagcctgagtcaggaaggggtcgctgtggagatcatggactatgaagattttaaatattgttgggaaaactttgtgtacaatgataatgagccattcaagccttggaagggattaaaaaccaactttcgacttctgaaaagaaggctacgggagagtctccagtgaggggtctccctgggcctcatggtctgtctcctctagcctcctgctcatgctgcacgggcctcccctccaccctggacccgctctgtttctgcctggtcatcctgagcccctcctggcctcagggccattccacagtgctcccctgcctcaccgcttcctcctcgctcttccagactcttcctgcagaggctcctttctgcctccatggctatccatccacccccacagaccccgttcctccagcctgcgtgcccctaacctggcttttcccatctccccagcataaccaaatcttactaaactcatcctaggctgggcatggtgactcacgcctgtaatcccccagcaatttgggaggcaaaggtgggagaatcgcgtgagcccaggagttccagaccaggctgggtcacatgacaaagccccatctctacaaaaaaaaaaaaaaaaaaaaaaaaaaag

SEQ ID NO: 6061 - DNA, 1311 bp, Homo sapiens
ctctaccggcgggatttgatggcgtgatgtctcacagaaagttctccgctcccagacatgggtccctcggcttcctgcctcggaagcgcagcagcaggcatcgtgggaaggtgaagagcttccctaaggatgacccgtccaagccggtccacctcacagccttcctgggatacaaggctggcatgactcacatcgtgcgggaagtcgacaggccgggatccaaggtgaacaagaaggaggtggtggaggctgtgaccattgtagagacaccacccatggtggttgtgggcattgtgggctacgtggaaacccctcgaggcctccggaccttcaagactgtctttgctgagcacatcagtgatgaatgcaagaggcgtttctataagaattggcataaatctaagaagaaggcctttaccaagtactgcaagaaatggcaggatgaggatggcaagaagcagctggagaaggacttcagcagcatgaagaagtactgccaagtcatccgtgtcattgcccacacccagatgcgcctgcttcctctgcgccagaagaaggcccacctgatggagatccaggtgaacggaggcactgtggccgagaagctggactgggcccgcgagaggcttgagcagcaggtacctgtgaaccaagtgtttgggcaggatgagatgatcgacgtcatcggggtgaccaagggcaaaggctacaaaggggtcaccagtcgttggcacaccaagaagctgccccgcaagacccaccgaggcctgcgcaaggtggcctgtattggggcatggcatcctgctcgtgtagccttctctgtggcacgcgctgggcagaaaggctaccatcaccgcactgagatcaacaagaagatttataagattggccagggctaccttatcaaggacggcaagctgatcaagaacaatgcctccactgactatgacctatctgacaagagcatcaaccctctgggtggctttgtccactatggtgaagtgaccaatgactttgtcatgctgaaaggctgtgtggtgggaaccaagaagcgggtgctcaccctccgcaagtccttgctggtgcagacgaagcggcgggctctggagaagattgaccttaagttcattgacaccacctccaagtttggccatggccgcttccagaccatggaggagaagaaagcattcatgggaccactgaagaaagaccgaattgcaaaggaagaaggagcttaatgccaggaacagattttgcagttggtggggtctcaataaaagttattttccactgaaaaaaaaaaaaaaaaaa

SEQ ID NO: 6062 - protein, 403 aa, Homo sapiens
MSHRKFSAPRHGSLGFLPRKRSSRHRGKVKSFPKDDPSKPVHLTAFLGYKAGMTHIVREVDRPGSKVNKKEVVEAVTIVETPPMVVVGIVGYVETPRGLRTFKTVFAEHISDECKRRFYKNWHKSKKKAFTKYCKKWQDEDGKKQLEKDFSSMKKYCQVIRVIAHTQMRLLPLRQKKAHLMEIQVNGGTVAEKLDWARERLEQQVPVNQVFGQDEMIDVIGVTKGKGYKGVTSRWHTKKLPRKTHRGLRKVACIGAWHPARVAFSVARAGQKGYHHRTEINKKIYKIGQGYLIKDGKLIKNNASTDYDLSDKSINPLGGFVHYGEVTNDFVMLKGCVVGTKKRVLTLRKSLLVQTKRRALEKIDLKFIDTTSKFGHGRFQTMEEKKAFMGPLKKDRIAKEEGA

SEQ ID NO: 6063 - DNA, 3089 bp, Homo sapiens
cccgcaggggttcctccaagatggcggcgcagaggaggagcttgctgcagagtgagcagcagccaagctggacagatgacctgcctctctgccacctctctggggttggctcagcctccaaccgcagctactctgctgatggcaagggcactgagagccacccgccagaggacagctggctcaagttcaggagtgagaacaactgcttcctgtatggggtcttcaacggctatgatggcaaccgagtgaccaacttcgtggcccagcggctgtccgcagagctcctgctgggccagctgaatgccgagcacgccgaggccgatgtgcggcgtgtgctgctgcaggccttcgatgtggtggagaggagcttcctggagtccattgacgacgccttggctgagaaggcaagcctccagtcgcaattgccagagggagtccctcagcaccagctgcctcctcagtatcagaagatccttgagagactcaagacgttagagagggaaatttcgggaggggccatggccgttgtggcggtccttctcaacaacaagctctacgtcgccaatgtcggtacaaaccgtgcacttttatgcaaatcgacagtggatgggttgcaggtgacacagctgaacgtggaccacaccacagagaacgaggatgagctcttccgtctttcgcagctgggcttggatgctggaaagatcaagcaggtggggatcatctgtgggcaggagagcacccggcggatcggggattacaaggttaaatatggctacacggacattgaccttctcagcgctgccaagtccaaaccaatcatcgcagagccagaaatccatggggcacagccgctggatggggtgacgggcttcttggtgctgatgtcggaggggttgtacaaggccctagaggcagcccatgggcctgggcaggccaaccaggagattgctgcgatgattgacactgagtttgccaagcagacctccctggacgcagtggcccaggccgtcgtggaccgggtgaagcgcatccacagcgacaccttcgccagtggtggggagcgtgccaggttctgcccccggcacgaggacatgaccctgctagtgaggaactttggctacccgctgggcgaaatgagccagcccacaccgagcccagccccagctgcaggaggacgagtgtaccctgtgtctgtgccatactccagcgcccagagcaccagcaagaccagcgtgaccctctcccttgtcatgccctcccagggccagatggtcaacggggctcacagtgcttccaccctggacgaagccacccccaccctcaccaaccaaagcccgaccttaaccctgcagtccaccaacacgcacacgcagagcagcagctccagctctgacggaggcctcttccgctcccggcccgcccactcgctcccgcctggcgaggacggtcgtgttgagccctatgtggactttgctgagttttaccgcctctggagcgtggaccatggcgagcagagcgtggtgacagcaccgtagggcagccggagaatgcagcccaagcagggcctggcatggggcaggacagggtccagccttttcctaacatctgcctgtgccacaacggccagcaggtgccccatcctctgcccacagcagactctgtcccatggctctccgggcagtagagtgtgtgagtgcagactggacctgtggttcataccttgtcaccacccgggaagctgaaggccacttcctcccagatggcctcagccaggaccatcgccctttctcagagcagagggccaggtatagaaaccgcagtgggcctgcaagccgcccgagcctccccagcagcctcctacagagcaggaagaggcgccctgtgaaccctgagtgttgcaggcccagcagaccctgctgtcccaagcccacccctcctcccaccatcacctccctcacctcgggacagtagccctccacttctccagcctctcagccctgtgctcctgcatccagagtggaacccaggctggtgtccgcatctgtccctgggccccacccctggacctgccttggttgtgtcatctgttgtaaacgttcaggaggaccagggcagcatctggggcctgggatggccacagaaggggcaggccaggtggaaaggagccagggggaagtggtctaagagacctggaactgccagaggatggcggcctgggcttccccagagccaggcgtgcgggagaggtgaggactggccccggtgggctgaggcaggggccgctgtcgtcaggcctgagccagggtgagctggtgcctgccttgcattttccttctggtgctgtgaagaccataggctggcaggcagctgagatgaactgtctttaccactgatgaggggcctctgccggctgagggtagcaagcaggggttgtgagtcaggctgggggacttgtttgaaagaaagaggagtggaaaatggttccaggagggaagaggttctttgagacacagtaccctgggaggcataggagaagggtcgggccagcccagcccagggcctgagttagactatttcccacatgttctctgccttcagtggggagggggtgccaccagggctgtcggccaggattgccactcctgtttcagaggaagcaggccgagagacttgcaccttggccaagccacacaatcagtggggcagccagagctcagacctgagccattttgtcagtatccaggaccccccggattctccacgccctccccatctcccagtctccctgccccccatgccccagaccggcccaccagggactagccgctgtcgcacagcctctggggtgcttggtctctgcgaagtcaaaggcctgacagctctgtggcctgggaatccattttcctgcggcagagcagggcctggtgtggaaccagggagctgtgggaagccacagcagaaatggaagaaaaacaggtctcagcccagggtcctcgctcactccctcactccccactttgaagccatctctgttctgcaggtgagaggatttaaagtcagtcacaaaggcttgggaacaaaaggaattc

SEQ ID NO: 6064 - DNA, 2182 bp, Homo sapiens
tgatgggtgacccggggagaggtacccggccagaggcgagtcctgcggagtggtagcgcgcacggcctgcggtgtgacacccagcccctgccagtcccccatggccccgtggagccgagaggcggtgctgagtctctatcgggctctgttgcgccagggccgacagcttcgctacactgatcgagacttctactttgcctccatccgccgtgaattccgaaaaaatcagaagctagaggacgctgaggcccgggagaggcagctggagaagggcctggtctttctcaacggcaaattggggaggatcatttaggatcctccaagggaaagaggacaaaggtgccttctgtagacactcctgctctcttccatccccatcttacagatgtattaagaagcctcagatgagcaatggcaggcgctggtgagcgcaaaggcaagaaggatgacaatggcattggcacggccattgactttgtgctctccaatgcccggctggtgctgggggtgggtggagcggccatgctgggcatcgccacgctggcagttaagcggatgtacgatcgggcgatcagtgcccctaccagccccacccgcctgagccattcggggaaaaggagctgggaagaacccaactggatgggctccccacgactgctgaacagggacatgaagacgggcctgagccggtccttgcagacccttcccacagactcctccaccttcgacacagatacattctgcccgccccggcccaagccagtggccaggaagggccaggtagacttgaagaagtcacgactccgcatgtccctgcaggagaaacttcttacttactaccggaaccgggcagccatccctgctggagagcaggctcgggccaagcaagctgctgtggacatatgtgccgagctccggagcttcctgcgggccaagttgcctgacatgccgcttcgggacatgtacttgagtggcagcctctacgatgacctgcaggtggtgacagctgaccacatccaactcattgtgccccttgtgctggagcagaacctgtggtcatgtattcctggtgaagacaccatcatgaatgtccctggcttcttcctggtgcgtcgtgagaatccagagtactttcctcgtgggagcagttactgggaccgctgtgtagtagggggctacctctctccaaagacagtcgcagatacatttgagaaggtagtggctggctccatcaattggccagccatagggtccctcttggactatgtgatccgcccggccccacccccagaagccctcacactggaggtgcagtatgagcgtgacaaacatctcttcattgacttcctgccatcagtgaccctcggtgacacagtcttggtggccaaaccacaccggctagcccagtatgacaacctgtggcggctgagcctgcgtcccgcggagacggcacgcctgcgggctctggaccaggctgactcgggctgccgatctctgtgcctcaagatcctcaaggccatatgcaagtccaccccggctctgggccacctcactgccagccagctaaccaatgtcatcctccacttggcccaggaggaggctgactggtctccggatatgctggccgaccgtttcctgcaggccttgaggggacttatcagctacttagaggctggagtcctgcccagtgccctaaaccccaaggacaaggccttgaaggaacgcagccttagacatcaggtgaggatgatggaggtagacagtcgactgaatgtcagctggaaaatccagtcactagttggggtttggtggccatgttttctacccagacaggccctgcttttctaggatgtggccttagagcaagaacagacccaacagccagcccttcatcctccagcgtctgccataggaatgtgagaggggtgtttgctgagcgctccgggcacggccagagggcaagtgagcatgcacggacctcttccccctgtcctgtttctcacccagcacctggggagatcggtgctaccaaggaagagagcacacagataagacagaggggaggaggtgggcatttcctacattcctccttgtttgccgctgctgagattgcagtatttattgcaatgtaaatgtatcctgaaggtggggaggaatgtttaatctaccatgtccgtgtgtc

SEQ ID NO: 6065 - DNA, 1805 bp, Homo sapiens
gaaaactcaggcttggaacagcacctcgcgcgataacctggcgtcctcggccttcacaataaaaactcttcgccggaaaacgacctttccccgcccactgcgctgacaccggaagcgaggcgtgtctgggagatcactccgcgctccggcggcgaaggaaagaacggactctgatcatagaagcctagtaaagtagtacacctctctcctttcgtgaggccataagaacaaactccttttctcgtcacagctacgccctgggcataaacggttggggcgtcaaagggagggagggaagggagcgggcgggaggagacggtcacgtggtcgcggcggaaggatgcgtctgtgctgcgtccccatagagacgaagtctataaagggccggcgggcggccacggcagccatttctactttgcccgcccacagatgtagttttctctgcgcgtgtgcgttttccctcctccccgccctcagggtccacggccaccatggcgtattaggggcagcagtgcctgcggcagcattggcctttgcagcggcggcagcagcaccaggctctgcagcggcaacccccagcggcttaagccatggccagcgttgctgtaaccgacaaagacaccttcgaattaagcacattcctcgattccagcaaagcaccgcaacatgaccgaaatgagcttcctgagcagcgaggtgttggtgggggacttgatgtcccccttcgaccagtcgggtttgggggctgaagaaagcctaggtctcttagatgattacctggaggtggccaagcacttcaaacctcatgggttctccagcgacaaggctaaggcgggctcctccgaatggctggctgtggatgggttggtcagtccctccaacaacagcaaggaggatgccttctccgggacagattggatgttggagaaaatggatttgaaggagttcgacttggatgccctgttgggtatagatgacctggaaaccatgccagatgaccttctgaccacgttggatgacacttgtgatctctttgcccccctagtccaggagactaataagcagcccccccagacggtgaacccaattggccatctcccagaaagtttaacaaaacccgaccaggttgcccccttcaccttcttacaacctcttcccctttccccaggggtcctgtcctccactccagatcattcctttagtttagagctgggcagtgaagtggatatcactgaaggagataggaagccagactacactgcttacgttgccatgatccctcagtgcataaaggaggaagacaccccttcagataatgatagtggcatctgtatgagcccagagtcctatctggggtctcctcagcacagcccctctaccaggggctctccaaataggagcctcccatctccaggtgttctctgtgggtctgcccgtcccaaaccttacgatcctcctggagagaagatggtagcagcaaaagtaaagggtgagaaactggataagaagctgaaaaaaatggagcaaaacaagacagcagccactaggtaccgccagaagaagagggcggagcaggaggctcttactggtgagtgcaaagagctggaaaagaagaacgaggctctaaaagagagggcggattccctggccaaggagatccagtacctgaaagatttgatagaagaggtccgcaaggcaagggggaagaaaagggtcccctagttgaggatagtcaggagcgtcaatgtgcttgtacatagagtgctgtagctgtgtgttccaataaattattttgtagggaaagt

SEQ ID NO: 6066 - DNA, 1107 bp, Homo sapiens
gtcggtcgcagcccgctcgggcccgttcgcgcccgtcctgtcggccacgtcccgcggggtggcgggcgcgctgcggcccttggtgcaggccacggtgcccgccaccccggagcagcctgtgttggacctgaagcggcccttcctcagccgggagtcgctgagcggccaggccgtgcgccggcctttggtcgcctccgtgggcctcaatgtccctgcttctgtttgttattcccacacagacgtcaaggtgcctgacttctctgaataccgccgccttgaagttttagatagtacgaagtcttcaagagaaagcaccgaggctaggaaaggtttctcctatttggtaactggagtaactactgtgggtgtcgcatatgctgccaagaatgccgtcacccagttcgtttccagcatgagtgcttctgctgatgtgttggccctggcgaaaatcgaaatcaagttatccgatattccagaaggcaagaacatggctttcaaatggagaggcaaacccctgtttgtacgtcatagaacccagaaggaaattaagcaggaagctgcagttgaattatcacagttgagggacccacagcatgatctagatcgagtaaagaaacctgaatgggttatcctgataggtgtttgcactcatcttggttgtgtacccattgcaaatgcaggagattttggtggttattactgcccttgccatgggtcacactatgatgcatctggcaggatcagattgggtcctgctactctcaaccttgaagtccccacgtatgagttcaccagtgacgatatggtgattgttggttagagacttggactcaagtcataggcttctttcagtctttatgtcacctcaggagacttatttgagaggaagccttctgtacttgaagttgatttgaaatatgtaagaattgatgatgtatttgcaaacattaatgtgaaataaattgaatttaatgttgaatactttcaggcattcacttaataaagccactgttaagcactgttatgctcagtcatacacgcgaaaggtacaacgtcttttagctaattctaattaaaaattacagactggtgtacaagatacttgtg

SEQ ID NO: 6067 - protein, 135 aa, Homo sapiens
MSASADVLALAKIEIKLSDIPEGKNMAFKWRGKPLFVRHRTQKEIKQEAAVELSQLRDPQHDLDRVKKPEWVILIGVCTHLGCVPIANAGDFGGYYCPCHGSHYDASGRIRLGPATLNLEVPTYEFTSDDMVIVG

SEQ ID NO: 6068 - DNA, 1692 bp, Homo sapiens
ccatggcggctggaggcgatcatggttcgcccgacagctaccgctcacctcttgcctcccgctatgccagcccggagatgtgcttcgtgtttagcgacaggtataaattccggacatggcggcagctgtggctgtggctggcggaggccgagcagacattgggtttgcctatcacagatgaacaaatccaggagatgaaatcaaacctggagaacatagacttcaagatggcagctgaggaagagaaacgtttacgacatgatgtgatggctcacgtgcacacatttggccactgctgtccaaaagctgcaggcattattcaccttggtgctacttcttgctatgttggagacaatactgacttgattattcttagaaatgcacttgacctgcttttgccaaagcttgccagagtgatctctcggcttgccgactttgctaaggaacgagccagtctacccacattaggtttcacacatttccagcctgcacagctgaccacagttgggaaacgttgctgtctttggattcaggatctttgcatggatctccagaacttgaagcgtgtccgagatgacctgcgcttccggggagtaaagggtaccactggcactcaggccagtttcctgcagctctttgagggagatgaccataaggtagagcagcttgacaagatggtgacagaaaaggcaggatttaagagagctttcatcatcacagggcagacatatacacgaaaagtggatattgaagtactgtctgtgctggctagcttgggggcatcagtgcacaagatttgcaccgacatacgcctcctggcaaacctcaaggagatggaggaaccctttgaaaaacagcagattggctcaagtgcgatgccatataagcggaatcccatgcgttcagaacgttgctgcagtcttgcccgccacctgatgacccttgtcatggacccgctacagacagcatctgtccagtggtttgaacgcacactggatgatagtgccaaccgacggatctgtttggccgaggcatttcttaccgcagatactatattgaatacgctgcagaacatttctgaaggattggtcgtgtaccccaaagtaattgaacggcgcattcggcaagagctgcctttcatggccacagagaacatcatcatggccatggtcaaagctggaggtagccgccaggattgccatgagaaaatcagagtgctttctcagcaggcagcttctgtggttaagcaggaagggggtgacaatgacctcatagagcgtatccaggttgatgcctacttcagtcccattcactcccagttggatcatttactggatccttcttctttcactggtcgtgcctcccagcaggtgcagagattcttagaagaggaggtgtatcccctgttaaaaccatatgaaagcgtgatgaaggtgaaagcagaattatgtctgtagagttggaagagaattaaacgaaaatcattgttaattgctgaggcatgaaaattgtgttactataacgccttattttacctcgagaattgttaccttaaattagtacagcactttcttcttcccatggtgctttcctgtttctcagtctcacatttctcaacaaggcaaaaacaaagagcgttgaagttgactctgctcttgcatagtaaatgtagttcatacttgaaaaaaaaaa

SEQ ID NO: 6069 - protein, 484 aa, Homo sapiens
MAAGGDHGSPDSYRSPLASRYASPEMCFVFSDRYKFRTWRQLWLWLAEAEQTLGLPITDEQIQEMKSNLENIDFKMAAEEEKRLRHDVMAHVHTFGHCCPKAAGIIHLGATSCYVGDNTDLIILRNALDLLLPKLARVISRLADFAKERASLPTLGFTHFQPAQLTTVGKRCCLWIQDLCMDLQNLKRVRDDLRFRGVKGTTGTQASFLQLFEGDDHKVEQLDKMVTEKAGFKRAFIITGQTYTRKVDIEVLSVLASLGASVHKICTDIRLLANLKEMEEPFEKQQIGSSAMPYKRNPMRSERCCSLARHLMTLVMDPLQTASVQWFERTLDDSANRRICLAEAFLTADTILNTLQNISEGLVVYPKVIERRIRQELPFMATENIIMAMVKAGGSRQDCHEKIRVLSQQAASVVKQEGGDNDLIERIQVDAYFSPIHSQLDHLLDPSSFTGRASQQVQRFLEEEVYPLLKPYESVMKVKAELCL

SEQ ID NO: 6070 - DNA, 3214 bp, Homo sapiens
gggtgggaggagccagcggccggggaggttctagtctgttctgtcttgcggcagccgcccccttctgcgcggtcacgccgagccagcgcctgggcctggaaccgggccgtagcccccccagtttcgcccaccacctccctaccatggacccccgcaaagtgaacgagcttcgggcctttgtgaaaatgtgtaagcaggatccgagcgttctgcacaccgaggaaatgcgcttcctgagggagtgggtggagagcatgggtggtaaagtaccacctgctactcagaaagctaaatcagaagaaaataccaaggaagaaaaacctgatagtaagaaggtggaggaagacttaaaggcagacgaaccatcaagtgaggaaagtgatctagaaattgataaagaaggtgtgattgaaccagacactgatgctcctcaagaaatgggagatgaaaatgcggagataacggaggagatgatggatcaggcaaatgataaaaaagtggctgctattgaagccctaaatgatggtgaactccagaaagccattgacttattcacagatgccatcaagctgaatcctcgcttggccattttgtatgccaagagggccagtgtcttcgtcaaattacagaagccaaatgctgccatccgagactgtgacagagccattgaaataaatcctgattcagctcagccttacaagtggcgggggaaagcacacagacttctaggccactgggaagaagcagcccatgatcttgcccttgcctgtaaattggattatgatgaagatgctagtgcaatgctgaaagaagttcaacctagggcacagaaaattgcagaacatcggagaaagtatgagcgaaaacgtgaagagcgagagatcaaagaaagaatagaacgagttaagaaggctcgagaagagcatgagagagcccagagggaggaagaagccagacgacagtcaggagctcagtatggctcttttccaggtggctttcctgggggaatgcctggtaattttcccggaggaatgcctggaatgggagggggcatgcctggaatggctggaatgcctggactcaatgaaattcttagtgatccagaggttcttgcagccatgcaggatccagaagttatggtggctttccaggatgtggctcagaacccagcaaatatgtcaaaataccagagcaacccaaaggttatgaatctcatcagtaaattgtcagccaaatttggaggtcaagcgtaatgtccttctgataaataaagcccttgctgaaggaaaagcaacctagatcaccttatggatgtcgcaataatacaaaccagtgtacctctgaccttctcatcaagagagctggggtgctttgaagataatccctacccctctcccccaaatgcagctgaagcattttacagtggtttgccattagggtattcattcagataatgttttcctactaggaattacaaactttaaacactttttaaatcttcaaaatatttaaaacaaatttaaagggcctgttaattcttatatttttctttactaatcattttggatttttttctttgaattattggcagggaatatacttatgtatggaagattactgctctgagtgaaataaaagttattagtgcgaggcaaacataactcatttgaggataaagtttgtgttggatatgtggttcctgatgcattttgacttgtctttttaaatgctttatctttttctttaaagatttatttcaataaaactaattgggaccacccgtatttcagtaggacctgggtagggattggaagtacttggcagggcagcagcaatcttgctgtgtttgatataacatgcatccttgggcaggttgcccttaaatcttacactgtggtgaagggatgttttttttgtaatgctgcagtagagttggagtacttagttctcttgttgtccagtatatctaataagtgtttttcatattatttccacgtaagggaaataaggtagtacttttctttttatatttctatgcttaaaattctctttcctagtcaaaaattgcccaaatctgtgtttgctttctgcttgctacatttgtctcccttacttttcttgagctaaagacaggctttttccaccggcatcatcactgctatcatcattaacagcgtaattatacaagcatatttaatgctgagtttaatttaatatgtaatacatatggtaattgtagggtaatacccacaacaactgtagtttcttacttggccaagagaatgcttatttaagtgttagacttccattctggcaaaatcttgccttatcagaagacattggaaagagggattccctttggtgtttggtcttctacttagaaaaacctattgcagttagtttatcttgtagtattcatctttgtattctgaagataaggtttgaattaaattgatacacacagaggggaaccgattttttttatccaatgtgaattataaatgagataatccacagttattcattgtggagttgttgagactatgaaagactcattgtctttgtattcagctcttaaatagtgtaactatatccccacctctgcttgctttctttccctcccctccaatgataaagaaaatgataaattttctgttgtgcattcaattcttattttaaataagactaagtataggcattgtacctgacattgctacgtttctaccagtgtttcaatttaaagtgctagtgtttaaaaacattttcaagggataaggccttctgtactttgcttatttgaagaatcagtggtaggagcagtgaagtaaattctatggagtacatttctaaaataccacatttctgaaatcataaataagtttattcaggttctaaccctttgctgtacacaagcagacagaaatgcatctgttacataaatgagaaaaagctattatgctgatggagcatgctttttaaatcctttaaaaacactcaccatataaacttgcatttgagcttgtgtgttcttttgttaatgtgtagagttctcctttctcgaaattgccagtgtgtacttggcttaactcaagaacagtttcttctggattccttatttgatttatttaacctaattatattctaatattgcaaatattaccataagtgggtaaaagtaaaattcctcttctgaaaaaaaaaaaaaaaaaaaaaa

SEQ ID NO: 6071 - protein, 369 aa, Homo sapiens
MDPRKVNELRAFVKMCKQDPSVLHTEEMRFLREWVESMGGKVPPATQKAKSEENTKEEKPDSKKVEEDLKADEPSSEESDLEIDKEGVIEPDTDAPQEMGDENAEITEEMMDQANDKKVAAIEALNDGELQKAIDLFTDAIKLNPRLAILYAKRASVFVKLQKPNAAIRDCDRAIEINPDSAQPYKWRGKAHRLLGHWEEAAHDLALACKLDYDEDASAMLKEVQPRAQKIAEHRRKYERKREEREIKERIERVKKAREEHERAQREEEARRQSGAQYGSFPGGFPGGMPGNFPGGMPGMGGGMPGMAGMPGLNEILSDPEVLAAMQDPEVMVAFQDVAQNPANMSKYQSNPKVMNLISKLSAKFGGQA

SEQ ID NO: 6072 - DNA, 508 bp, Homo sapiens
cccaaaatggcggcagcgatggatgtggataccccgagcggcaccaacagcggcgcgggcaagaagcgctttgaagtgaaaaagtggaatgcagtagccctctgggcctgggatattgtggttgataactgtgccatctgcaggaaccacattatggatctttgcatagaatgtcaagctaaccaggcgtccgctacttcagaagagtgtactgtcgcatggggagtctgtaaccatgcttttcacttccactgcatctctcgctggctcaaaacacgacaggtgtgtccattggacaacagagagtgggaattccaaaagtatgggcactaggaaaagacttcttccatcaagcttaattgttttgttattcatttaattgactttccctgctgttacctaattacaaattggatggaactgtgtttttttctgctttgttttttcagtttgctgtttctgtagccatattgtattctgtgtcaaataaagtccagttggattctgg

SEQ ID NO: 6073 - protein, 108 aa, Homo sapiens [sequence omitted]

SEQ ID NO: 6074 - DNA, 576 bp, Homo sapiens
gctctttctcagtgaccgggttctaggcttaggcgcagacgggttaggggagccaacatgccagtggcccggagctgggtttgtcgcaaaacttacgtgaccccgcggagatcctttgagaaatctcgtctcgaccaagagctgaagctgatcgaagagtatgggctccggaataaacgtgaggtctggagggtcaaatttaccctggccaagatagaggatttcttagagagacgcctacagacccaggtcttcaagctgggcttggccaagtccatccaccacgctcgcgtgctgatccgccagcgccatttcagggtccgcaagcaggtggtgaacatcccgtccttcattgtccgcctggattcccagaagcacatcgacttctctctgtgctctccctatgggggtggccgcccgggccgcgtgaagaggaagaatgccaagaagggccagggtggggctggggctggagaccacaaggaggaggattaagcccacctgtccctcctgggctgctgcattgtctagttttcctgccaaataaacaggatcagcgctttaaaaaaaaaaaaa

SEQ ID NO: 6075 - DNA, 1764 bp, Homo sapiens
atggcctcggaagacattgccaagctggcagagacacttgccaagactcaggtggccgggggacagctgagtttcaaaggcaagagcctcaaactcaacactgcagaagatgctaaagatgtgattaaagagattgaagactttgacagcttggaggctctgcgtctggaaggcaacacagtgggcgtggaagcagccagggtcatcgccaaggccttagagaagaagtcggagttgaagcgctgccactggagtgacatgttcacgggaaggctgcggaccgagatcccaccagccctgatctcactaggggaaggactcatcacagctggggctcagctggtggagctggacttaagcgacaacgcattcgggcccgacggtgtgcaaggcttcgaggccctgctcaagagctcagcctgcttcaccctgcaggaactcaagctcaacaactgtggcatgggcattggcggcggcaagatcctggctgcagctctgaccgaatgtcaccggaaatccagtgcccaaggcaagcctctggccctgaaggtctttgtggctggcagaaaccgtctggagaatgatggcgccactgccttggcagaagcttttagggtcatcgggaccctggaggaggtccacatgccacagaatgggatcaaccaccctggcatcactgccctggcccaggctttcgctgtcaaccccctgctgcgggtcatcaacctgaatgacaacaccttcactgagaagggcgccgtggccatggccgagaccttgaagaccttgcggcaggtggaggtgattaattttggggactgcctggtgcgctccaagggtgcagttgccattgcagatgccatccgcggcggcctgcccaagctaaaggagctgaacttgtcattctgtgaaatcaagagggatgctgccctggctgttgctgaggccatggcagacaaagctgagctggagaagctggacctgaatggcaacaccctgggagaagaaggctgtgaacagcttcaggaggtgctggagggcttcaacatggccaaggtgctggcgtccctcagtgatgacgaggacgaggaggaggaggaggaaggagaagaggaagaagaggaagcagaagaagaggaggaggaagatgaggaagaggaggaagaagaggaggaggaggaggaagaagagcctcagcagcgagggcagggagagaagtcagccacgccctcacggaagattctggaccctaacactggggagccagctcccgtgctgtcctccccacctcctgcagacgtctccaccttcctggcttttccctctccagagaagctcctgcgcctagggcccaagagctccgtgctgatagcccagcagactgacacgtctgaccccgagaaggtggtctctgccttcctaaaggtgtcatctgtgttcaaggacgaagctactgtgaggatggcagtgcaggatgcagtagatgccctgatgcagaaggctttcaactcctcgtccttcaactccaacaccttcctcaccaggctcctcgtgcacatgggtctgctcaagagtgaagacaaggtcaaggccattgccaacctgtacggccccctgatggcgctgaaccacatggtgcagcaggactatttccccaaggcccttgcacccctgctgctggcgttcgtgaccaagcccaacagcgccctggaatcctgctccttcgcccgccacagtctgctgcagacgctgtacaaggtctag

SEQ ID NO: 6076 - protein, 587 aa, Homo sapiens
MASEDIAKLAETLAKTQVAGGQLSFKGKSLKLNTAEDAKDVIKEIEDFDSLEALRLEGNTVGVEAARVIAKALEKKSELKRCHWSDMFTGRLRTEIPPALISLGEGLITAGAQLVELDLSDNAFGPDGVQGFEALLKSSACFTLQELKLNNCGMGIGGGKILAAALTECHRKSSAQGKPLALKVFVAGRNRLENDGATALAEAFRVIGTLEEVHMPQNGINHPGITALAQAFAVNPLLRVINLNDNTFTEKGAVAMAETLKTLRQVEVINFGDCLVRSKGAVAIADAIRGGLPKLKELNLSFCEIKRDAALAVAEAMADKAELEKLDLNGNTLGEEGCEQLQEVLEGFNMAKVLASLSDDEDEEEEEEGEEEEEEAEEEEEEDEEEEEEEEEEEEEEPQQRGQGEKSATPSRKILDPNTGEPAPVLSSPPPADVSTFLAFPSPEKLLRLGPKSSVLIAQQTDTSDPEKVVSAFLKVSSVFKDEATVRMAVQDAVDALMQKAFNSSSFNSNTFLTRLLVHMGLLKSEDKVKAIANLYGPLMALNHMVQQDYFPKALAPLLLAFVTKPNSALESCSFARHSLLQTLYKV

SEQ ID NO: 6077 - DNA, 1000 bp, Homo sapiens
cgggaggcgaggtgcgcgagccgagtccggggcacgatgtccgacgcgggcggcggaaagaagccgcctgtggacccgcaggcaggacccggtccggggccggggcgcgcagctggggaaaggggcctgtcggggtccttccccctggtcctgaagaagctgatggagaaccccccgcgcgaggcgcgcctcgataaggaaaaggggaaggaaaagctggaggaggacgaggccgcagccgccagcaccatggctgtctcagcctccctcatgccacccatctgggacaagaccatcccatatgatggcgaatctttccacctggagtacatggacctggatgagttcctgctggagaatggcatccccgccagccccacccacctggcccacaacctgctgctgcctgtagcagagctagaagggaaggagtctgccagctcttccacagcatccccaccatcctcctccactgccatctttcagccctctgaaaccgtgtccagcacagaatcttccctggagaaggagagggagactcccagtcccatcgaccccaattgtgtggaagtggatgtgaacttcaatccggaccccgccgacctggtgctctccagtgtgccaggcggggagctcttcaaccctcggaagcacaagtttgctgaggaggacctgaagccccagcctatgatcaaaaaggccaagaaggtctttgtccccgacgagcagaaggatgaaaagtactggacaagacgcaagaagaacaacgtggcagctaaacggtcacgggatgcccggcgcctgaaagagaatcagatcaccatccgggcagccttcctggagaaggagaacacagccctgcggacggaggtggccgagctacgcaaggaggtgggcaagtgcaagaccatcgtgtccaagtatgagaccaaatacgggcccttgtaacccgtgccccccgcccgggcggggtactgcctgcacctcagacctctgcctg

SEQ ID NO: 6078 - protein, 303 aa, Homo sapiens
MSDAGGGKKPPVDPQAGPGPGPGRAAGERGLSGSFPLVLKKLMENPPREARLDKEKGKEKLEEDEAAAASTMAVSASLMPPIWDKTIPYDGESFHLEYMDLDEFLLENGIPASPTHLAHNLLLPVAELEGKESASSSTASPPSSSTAIFQPSETVSSTESSLEKERETPSPIDPNCVEVDVNFNPDPADLVLSSVPGGELFNPRKHKFAEEDLKPQPMIKKAKKVFVPDEQKDEKYWTRRKKNNVAAKRSRDARRLKENQITIRAAFLEKENTALRTEVAELRKEVGKCKTIVSKYETKYGPL

SEQ ID NO: 6079 - DNA, 2467 bp, Homo sapiens
catctttgtcagtgcacaaaatggcgccctacagcctactggtgactcggctgcagaaagctctgggtgtgcggcagtaccatgtggcctcagtcctgtgccaacgggccaaggtggcgatgagccactttgagcccaacgagtacatccattatgacctgctagagaagaacattaacattgttcgcaaacgactgaaccggccgctgacactctcggagaagattgtgtatggacacctggatgaccccgccagccaggaaattgagcgaggcaagtcgtacctgcggctgcggccggaccgtgtggccatgcaggatgcgacggcccagatggccatgctccagttcatcagcagcgggctgtccaaggtggctgtgccatccaccatccactgtgaccatctgattgaagcccaggttgggggcgagaaagacctgcgccgggccaaggacatcaaccaggaagtttataatttcctggcaactgcaggtgccaaatatggcgtgggcttctggaagcctggatctggaatcattcaccagattattctggaaaactatgcgtaccctggtgttcttctgattggcactgactcccacacccccaatggtggcggccttgggggcatctgcattggagttgggggtgccgatgctgtggatgtcatggctgggatcccctgggagctgaagtgccccaaggtgattggcgtgaagctgacgggctctctctccggttggtcctcacccaaagatgtgatcctgaaggtggcaggcatcctcacggtgaaaggtggcacaggtgcaatcgtggaataccacgggcctggtgtagactccatctcctgcactggcatggcgacaatctgcaacatgggtgcagaaattggggccaccacttccgtgttcccttacaaccacaggatgaagaagtacctgagcaagaccggccgggaagacattgccaatctagctgatgaattcaaggatcacttggtgcctgaccctggctgccattatgaccaactaattgaaattaacctcagtgagctgaagccacacatcaatgggcccttcacccctgacctggctcaccctgtggcagaagtgggcaaggtggcagagaaggaaggatggcctctggacatccgagtgggtctaattggtagctgcaccaattcaagctatgaagatatggggcgctcagcagctgtggccaagcaggcactggcccatggcctcaagtgcaagtcccagttcaccatcactccaggttccgagcagatccgcgccaccattgagcgggacggctatgcacagatcttgagggatctgggtggcattgtcctggccaatgcttgtggcccctgcattggccagtgggacaggaaggacatcaagaagggggagaagaacacaatcgtcacctcctacaacaggaacttcacgggccgcaacgacgcaaaccccgagacccatgcctttgtcacgtccccagagattgtcacagccctggccattgcgggaaccctcaagttcaacccagagaccgactacctgacgggcacggatggcaagaagttcaggctggaggctccggatgcagatgagcttcccaaaggggagtttgacccagggcaggacacctaccagcacccacccaaggacagcagcgggcagcatgtggacgtgagccccaccagccagcgcctgcagctcctggagccttttgacaagtgggatggcaaggacctggaggacctgcagatcctcatcaaggtcaaagggaagtgtaccactgaccacatctcagctgctggcccctggctcaagttccgtgggcacttggataacatctccaacaacctgctcattggtgccatcaacattgaaaacggcaaggccaactccgtgcgcaatgccgtcactcaggagtttggccccgtccctgacactgcccgctactacaagaaacatggcatcaggtgggtggtgatcggagacgagaactacggcgagggctcgagccgggagcatgcagctctggagcctcgccaccttgggggccgggccatcatcaccaagagctttgccaggatccacgagaccaacctgaagaaacagggcctgctgcctctgaccttcgctgacccggctgactacaacaagattcaccctgtggacaagctgaccattcagggcctgaaggacttcacccctggcaagcccctgaagtgcatcatcaagcaccccaacgggacccaggagaccatcctcctgaaccacaccttcaacgagacgcagattgagtggttccgcgctggcagtgccctcaacagaatgaaggaactgcaacagtgagggcagtgcctccccgccgcgctggcgtcaagttcagctccacgtgtgccatcagtggatccgatccgtccagccatggcttcctattccaagtagtgtaaccc

SEQ ID NO: 6080 - protein, 780 aa, Homo sapiens
MAPYSLLVTRLQKALGVRQYHVASVLCQRAKVAMSHFEPNEYIHYDLLEKNINIVRKRLNRPLTLSEKIVYGHLDDPASQEIERGKSYLRLRPDRVAMQDATAQMAMLQFISSGLSKVAVPSTIHCDHLIEAQVGGEKDLRRAKDINQEVYNFLATAGAKYGVGFWKPGSGIIHQIILENYAYPGVLLIGTDSHTPNGGGLGGICIGVGGADAVDVMAGIPWELKCPKVIGVKLTGSLSGWSSPKDVILKVAGILTVKGGTGAIVEYHGPGVDSISCTGMATICNMGAEIGATTSVFPYNHRMKKYLSKTGREDIANLADEFKDHLVPDPGCHYDQLIEINLSELKPHINGPFTPDLAHPVAEVGKVAEKEGWPLDIRVGLIGSCTNSSYEDMGRSAAVAKQALAHGLKCKSQFTITPGSEQIRATIERDGYAQILRDLGGIVLANACGPCIGQWDRKDIKKGEKNTIVTSYNRNFTGRNDANPETHAFVTSPEIVTALAIAGTLKFNPETDYLTGTDGKKFRLEAPDADELPKGEFDPGQDTYQHPPKDSSGQHVDVSPTSQRLQLLEPFDKWDGKDLEDLQILIKVKGKCTTDHISAAGPWLKFRGHLDNISNNLLIGAINIENGKANSVRNAVTQEFGPVPDTARYYKKHGIRWVVIGDENYGEGSSREHAALEPRHLGGRAIITKSFARIHETNLKKQGLLPLTFADPADYNKIHPVDKLTIQGLKDFTPGKPLKCIIKHPNGTQETILLNHTFNETQIEWFRAGSALNRMKELQQ

SEQ ID NO: 6081 - DNA, 2743 bp, Homo sapiens
gcgggccgttatccatttgtgttgttcgccagctaggcctggcctcgtcccgcttcgctcggtcggtctcgcgcgcccccatagccttgctagagggttagcgttagccttaagtgtgcgaatccgaggagcagcgacagactcgagaccacgctccttcctcgggaaggaggcggcacctcgcgtttgaggcccgcctgcgtttgaggcccgcctgcgcttgcggcccgcctgcgcttgaggcctgtctgcgtttgagatctcattgggcgtgattgaggaatttggggaggtttttgggcggtattgaggacgagggggtccgttagtcagcatagaatcctggagcgggaatccctcaccgtctaaatggcgtcgggggcgggacctccgggatctggcttccgcgggccgccgccggccctgaaacgtgagggatagctgagatgaggcagctactgggatggcccccatgcgcatttacatgcagtccgactgccgagctttcgaggcagcaggatttaccgtccacattcctcactactaaccaagcttttagaacagatctcacaagaacctagaggtcggtattttttcgatttaaatttgcctgttactgacgttaacgtctttcgcctagtgagcagtagccaacatgtcagggtgggagtcatattacaaaaccgagggcgatgaagaagcagaggaagaacaagaagagaaccttgaagcaagtggagactataaatattcaggaagagatagtttgatttttttggttgatgcctccaaggctatgtttgaatctcagagtgaagatgagttgacaccttttgacatgagcatccagtgtatccaaagtgtgtacatcagtaagatcataagcagtgatcgagatctcttggctgtggtgttctatggtaccgagaaagacaaaaattcagtgaattttaaaaatatttacgtcttacaggagctggataatccaggtgcaaaacgaattctagagcttgaccagtttaaggggcagcagggacaaaaacgtttccaagacatgatgggccacggatctgactactcactcagtgaagtgctgtgggtctgtgccaacctctttagtgatgtccaattcaagatgagtcataagaggatcatgctgttcaccaatgaagacaacccccatggcaatgacagtgccaaagccagccgggccaggaccaaagccggtgatctccgagatacaggcatcttccttgacttgatgcacctgaagaaacctgggggctttgacatatccttgttctacagagatatcatcagcatagcagaggatgaggacctcagggttcactttgaggaatccagcaagctagaagacctgttgcggaaggttcgcgccaaggagaccaggaagcgagcactcagcaggttaaagctgaagctcaacaaagatatagtgatctctgtgggcatttataatctggtccagaaggctctcaagcctcctccaataaagctctatcgggaaacaaatgaaccagtgaaaaccaagacccggacctttaatacaagtacaggcggtttgcttctgcctagcgataccaagaggtctcagatctatgggagtcgtcagattatactggagaaagaggaaacagaagagctaaaacggtttgatgatccaggtttgatgctcatgggtttcaagccgttggtactgctgaagaaacaccattacctgaggccctccctgttcgtgtacccagaggagtcgctggtgattgggagctcaaccctgttcagtgctctgctcatcaagtgtctggagaaggaggttgcagcattgtgcagatacacaccccgcaggaacatccctccttattttgtggctttggtgccacaggaagaagagttggatgaccagaaaattcaggtgactcctccaggcttccagctggtctttttaccctttgctgatgataaaaggaagatgccctttactgaaaaaatcatggcaactccagagcaggtgggcaagatgaaggctatcgttgagaagcttcgcttcacatacagaagtgacagctttgagaaccccgtgctgcagcagcacttcaggaacctggaggccttggccttggatttgatggagccggaacaagcagtggacctgacattgcccaaggttgaagcaatgaataaaagactgggctccttggtggatgagtttaaggagcttgtttacccaccagattacaatcctgaagggaaagttaccaagagaaaacacgataatgaaggttctggaagcaaaaggcccaaggtggagtattcagaagaggagctgaagacccacatcagcaagggtacgctgggcaagttcactgtgcccatgctgaaagaggcctgccgggcttacgggctgaagagtggtctgaagaagcaggagctgctggaagccctcaccaagcacttccaggactgaccagaggccgcgcgtccagctgcccttccgcagtgtggccaggctgcctggccttgtcctcagccagttaaaatgtgtttctcctgagctaggaagagtctacccgacataagtcgagggactttatgtttttgaggctttctgttgccatggtgatggtgtagccctcccactttgctgttctttactttactgcctgaataaagagccctaagtttgtactaaaaaaaaaaaaaaaaaaaaaaaaaaaaaaaaaaa

SEQ ID NO: 6082 - protein, 609 aa, Homo sapiens
MSGWESYYKTEGDEEAEEEQEENLEASGDYKYSGRDSLIFLVDASKAMFESQSEDELTPFDMSIQCIQSVYISKIISSDRDLLAVVFYGTEKDKNSVNFKNIYVLQELDNPGAKRILELDQFKGQQGQKRFQDMMGHGSDYSLSEVLWVCANLFSDVQFKMSHKRIMLFTNEDNPHGNDSAKASRARTKAGDLRDTGIFLDLMHLKKPGGFDISLFYRDIISIAEDEDLRVHFEESSKLEDLLRKVRAKETRKRALSRLKLKLNKDIVISVGIYNLVQKALKPPPIKLYRETNEPVKTKTRTFNTSTGGLLLPSDTKRSQIYGSRQIILEKEETEELKRFDDPGLMLMGFKPLVLLKKHHYLRPSLFVYPEESLVIGSSTLFSALLIKCLEKEVAALCRYTPRRNIPPYFVALVPQEEELDDQKIQVTPPGFQLVFLPFADDKRKMPFTEKIMATPEQVGKMKAIVEKLRFTYRSDSFENPVLQQHFRNLEALALDLMEPEQAVDLTLPKVEAMNKRLGSLVDEFKELVYPPDYNPEGKVTKRKHDNEGSGSKRPKVEYSEEELKTHISKGTLGKFTVPMLKEACRAYGLKSGLKKQELLEALTKHFQD

SEQ ID NO: 6083 - DNA, 1475 bp, Homo sapiens
atccgtgtccttgcggtgctgggcagcagaccgtccaaaccgacacgcgtggtatcctcgcggtgtccggcaagagactaccaagacagacgctatgactgaggctgatgtgaatccaaaggcctatccccttgccgatgcccacctcaccaagaagctactggacctcgttcagcagtcatgtaactataagcagcttcggaaaggagccaatgaggccaccaaaaccctcaacaggggcatctctgagttcatcgtgatggctgcagacgccgagccactggagatcattctgcacctgccgctgctgtgtgaagacaagaatgtgccctacgtgtttgtgcgctccaagcaggccctggggagagcctgtggggtctccaggcctgtcatcgcctgttctgtcaccatcaaagaaggctcgcagctgaaacagcagatccaatccattcagcagtccattgaaaggctcttagtctaaacctgtggcctctgccacgtgctccctgccagcttcccccctgaggttgtgtatcatattatctgtgttagcatgtagtattttcagctactctctattgttataaaatgtagtactaaatctggtttctggatttttgtgttgtttttgttctgttttacagggttgctatcccccttcctttcctccctccctctgccatccttcatccttttatcctccctttttggaacaagtgttcagagcagacagaagcagggtggtggcaccgttgaaaggcagaaagagccaggagaaagctgatggagccaggacagagatctggttccagctttcagccactagcttcctgttgtgtgcggggtgtggtggaattaaacagcattcattgtgtgtccctgtgcctggcacacagaatcattcatacgtgttcaagtgatcaaggggtttcatttgctcttgggggattaggtatcatttggggaggaagcatgtgttctgtgaggttgttcggctatgtccaagtgtcgtttactaatgtacccctgctgtttgcttttggtaatgtgatgttgatgttctccccctacccacaaccatgcccttgagggtagcagggcagcagcataccaaagagatgtgctgcaggactccggaggcagcctgggtgggtgagccatggggcagttgacctgggtcttgaaagagtcgggagtgacaagctcagagagcatgaactgatgctggcatgaaggattccaggaagatcatggagacctggctggtagctgtaacagagatggtggagtccaaggaaacagcctgtctctggtgaatgggactttctttggtggacacttggcaccagctctgagagcccttcccctgtgtcctgccaccatgtgggtcagatgtactctctgtcacatgaggagagtgctagttcatgtgttctccattcttgtgagcatcctaataaatctgttccattttg

SEQ ID NO: 6084 - protein, 128 aa, Homo sapiens
MTEADVNPKAYPLADAHLTKKLLDLVQQSCNYKQLRKGANEATKTLNRGISEFIVMAADAEPLEIILHLPLLCEDKNVPYVFVRSKQALGRACGVSRPVIACSVTIKEGSQLKQQIQSIQQSIERLLV

SEQ ID NO: 6085 - DNA, 4249 bp, Homo sapiens
ccgtcggtgaggcggtgccgggcgggggttgtcgggtgtcatgggcggtggcgacggcaccgcccccgcgtctccctgagcgggacggcagggggggcttctgcgctgagccgggcgatggacgacagcggcgagctgggtggtctggagaccatggagaccctcacggagctgggcgacgagctgaccctgggagacatcgacgagatgctgcaatttgtcagtaatcaagtgggagagttccctgacttgttttcagaacagctgtgtagctcctttcctggcagtggtggtagtggtagcagcagcggcagcagtggcagcagcagcagcagcagcaatggcaggggcagcagcagcggagctgtggacccttcagtgcaacggtcattcacccaggtcacattaccttccttctctccctcggcggcctccccacaggctccaactctgcaagtcaaggtttctcccacctcagttcccaccacacccagggcaactcctattcttcagccccgcccccagccccagcctcaacctcaaactcagctgcaacaacagacggtaatgatcacgccaacattcagcaccactccgcagacgaggatcatccagcagcctttgatataccagaatgcagctactagctttcaagtccttcagcctcaagtccaaagcctggtgacatcctcccaggtacagccggtcaccattcagcagcaggtgcagacagtacaggcccagcgggtgctgacacaaacggccaatggcacgctgcagacccttgccccggctacggtgcagacagttgctgcgccacaggtgcagcaggtcccggtcctggtccagcctcagatcatcaagacagattcccttgttttgaccacactgaagacagatggcagccctgttatggctgcggtccagaacccggccctcaccgccctcaccacccctatccagacggctgcccttcaagtaccaaccctggtgggcagcagtgggaccattctgaccacaatgcctgtaatgatggggcaagagaaagtgcccattaagcaggtacctgggggagtcaagcagcttgagccccccaaagaaggagaaaggcggacaacccataatatcattgagaaacgatatcgctcctccatcaatgacaaaatcatcgaattgaaagacctggtcatggggacagacgccaagatgcacaagtctggcgttctgaggaaggccattgattacatcaaatacttgcagcaggtcaatcataaactgcgccaggagaacatggtgctgaagctggcaaatcaaaagaacaagcttctaaagggcatcgacctaggcagtctggtggacaatgaggtggacctgaagatcgaggactttaatcagaatgtccttctgatgtcccccccagcctctgactcagggtcccaggctggcttctctccctactccattgactctgagccaggaagccctctattggatgatgcaaaggtcaaagatgagccagactctcctcctgtggcgctgggcatggtagaccgctcacggattcttctgtgtgtcctcaccttcctgtgcctctcctttaaccccctgacttccctgctgcagtggggaggggcccacgactctgaccagcacccacactcaggctctggccgcagtgtcctgtcattcgagtcaggttctgggggctggtttgactggatgatgcctactcttctcttatggctggtaaatggtgtgattgtcctgagcgtctttgtgaagctgctggttcatggggagccagtgatccggccacactcgcgctcctcggtcaccttctggaggcaccggaaacaggcagatctggatctcgccagaggagattttgcagctgctgccgccaacctacaaacctgcctggcagttttgggccgggcactgcccacctcccgcctggacctggcctgcagcctctcctggaacgtgatccgctacagcctgcagaagctacgcctggtgcgctggctgctcaagaaagtcttccagtgccggcgggccacgccagccactgaggcaggctttgaagacgaagctaagaccagcgcccgggatgcggctctggcctatcaccggctgcaccagctgcacatcacagggaagcttcctgcaggatccgcctgttccgatgtacacatggcgttgtgtgccgtgaacctggctgaatgtgcagaggagaagatcccaccgagcacactggttgagatccatctgactgctgccatggggctcaagacccggtgtggaggcaagctgggcttcctggccagctacttcctcagccgagcccagagcctgtgtggccccgagcacagtgctgttcctgactccctgcgctggctctgccaccccctgggccagaagtttttcatggagcggagctggtctgtgaagtcagctgccaaggagagtctatactgtgcccagaggaacccagctgaccccattgcgcaggtccaccaggccttctgcaagaacctgctggagcgagctatagagtccttggtgaaacctcaggccaagaagaaggctggagaccaggaagaagagagctgtgaattctccagtgctctggagtacttgaaattacttcattcttttgtggactctgtgggggttatgagccccccactctccaggagctccgtgctcaagtccgccctgggtccagacatcatctgtcggtggtggacgtctgcaatcactgtggccatcagctggctccagggagacgatgcagctgtgcgctctcattttaccaaagtggaacgcatccccaaggccctggaagtgacagagagccccctggtgaaggccatcttccatgcctgcagagccatgcatgcctcactccctgggaaagcagatgggcagcagagttccttctgccattgcgagagggccagtggccacctatggagcagcctcaacgtcagtgggggcacctctgaccctgccctcaaccacgtggtccagctgctcacctgtgacctgctactgtcgctacggacagcgctctggcaaaaacaggccagtgccagccaggctgtgggggagacctaccacgcgtcaggcgctgaactggcgggcttccaacgggacctgggcagcctgcgcaggctggcacacagcttccgcccagcataccgcaaggtgttcctgcatgaagccaccgtgcgcctgatggcaggaggcagccccacccgcacccaccagctgctggaacacagcctgcggcggcgcaccacgcagagcaccaagcacggagaggtggatgcctggcccggccagcgagagcgggccaccgccatcctgctggcctgccgccacctgcccctctccttcctctcctccccgggccagcgggcagtgctgctggccgaagctgcccgcaccctggagaaggtgggcgaccggcgctcctgcaacgactgccagcagatgattgttaagctgggtggtggcactgccattgccgcctcctgaccaccaggctcagcccacccctccacctctctctcgatttctctctctccccctcagcatcttcccgctgagagtggtggggaagagccttgtcttcttagctgtcacctgccgaggcttctgggccactcaggccagtgcacccctgggcagagccccttaaagctgctgtcactagatgcccatggtccagggcctggtgggcgtgagaggataggtggcagggcagaaactgggcagccctgacttgatagcagcagggggagctcccaagctgccaagcccctgcctccagccttcctgagtttctctctcctgaaccctactctctcctttttgcttcctcagtttttatcaggctttctctgggggacagcagtctctgagcaccagggagcagttgccctcaggcctgtgcccagcatgccctcccctttttatacgaatgttttctaccagtgtgcttgggtttgccatgatgcgaggctgagttgctgtagcgtcttgattctctccctgggtctgcgttccctcccctgggcctgactgagcctgctcattgtttttccctttattacacaggacagccaggggaggaggggggcccagccctgggaggctggtgggaggcagggggcaggcctgcggatgcatgaaataatgttggcattattttttaattttttaaaaaataaatggtatctta

SEQ ID NO: 6086 - protein, 1141 aa, Homo sapiens [sequence omitted]

SEQ ID NO: 6087 - DNA, 3637 bp, Homo sapiens
gattcgagtcagaagcggcggcaggtctgaacgcttcggtaggataagtgcggtgggagggggctctgcggttttggggagcccagggcgggaacccggacccggctggaagtccggagcctggccgcagccccgcccctccgctctttcttggtgaccttaagccagtggctgcctttttctgagcccgggcggggccgaaggcggcccgtaggccctcgggactcccagcactgcagagggtgtgaggtctgacatccaagacacgttgtttcgtatttctgaaggaagaactgaagctccgggaagtgatggctggggatggggcgggcaacttggggaccgagtgtacgatccacgcctaaggttgagggcggccgagctagccaggcagccgtgaccccagtgcttttcagacgtttcttagcttccagagcccaacacatacagctgatacacgcagaccagatctggtcaggtcctcggaagctgagtccagagcgatgctgctgaagacagtgctcttgctgggacatgtggcccaggtgctgatgctggacaatgggctcctgcagacaccacccatgggctggctggcctgggaacgcttccgctgcaacattaactgtgatgaggacccaaagaactgcataagtgaacagctcttcatggagatggctgaccggatggcacaggatggatggcgggacatgggctacacatacctcaacattgatgactgctggatcggtggtcgcgatgccagtggccgcctgatgccggatcccaagcgcttccctcatggcattcctttcctggctgactacgttcactccctgggcctgaagttgggtatctacgcggacatgggcaacttcacctgcatgggttacccaggcaccacactggacaaggtggtccaggatgctcagaccttcgccgagtggaaggtagacatgctcaagctggatggctgcttctccacccccgaggagcgggcccaggggtaccccaagatggctgctgccctgaatgccacaggccgccccatcgccttctcctgcagctggccagcctatgaaggcggcctccccccaagggtgaactacagtctgctggcggacatctgcaacctctggcgtaactatgatgacatccaggactcctggtggagcgtgctctccatcctgaattggttcgtggagcaccaggacatactgcagccagtggccggccctgggcactggaatgaccctgacatgctgctcattgggaactttggtctcagcttagagcaatcccgggcccagatggccctgtggacggtgctggcagcccccctcttgatgtccacagacctgcgtaccatctccgcccagaacatggacattctgcagaatccactcatgatcaaaatcaaccaggatcccttaggcatccagggacgcaggattcacaaggaaaaatctctcatcgaagtgtacatgcggcctctgtccaacaaggctagcgccttagtcttcttcagctgcaggaccgatatgccttatcgctaccactcctcccttggccagctgaacttcaccgggtctgtgatatatgaggcccaggacgtctactcaggtgacatcatcagtggcctccgagatgaaaccaacttcacagtgatcatcaacccttcaggggtagtgatgtggtacctgtatcccatcaagaacctggagatgtcccagcagtgaggagctgggacatgtgacaggctgtggtggcaccactgagcctagaccatggagccttggcatgcccagggcaagtggggaggttctctgctccccaggcctgctcggtgactgaccccatcatacccaaagtgcaatctcacggccaggttctatgccctgtccaagcgtaaaccctcttggaaacttcttttggggcaattttcctgtggccttcctggcctctacttccatgtgcgcagccccacagacgttgctgagcaactcgccagcctcctgagctccatgcccatcaggactctagcctctgaccttgctgttgactctgaaatcaggatttggaagttttcgaattaggagtagagagatctgacctcttgccaggaatgcccatggatcatgtgattggcttttctacccatagagggccttgcagcctgataccacctgggagtgagggtcacaaaggagaccttggctccctcaggtcaccaataaacctgttctttaatcaagtagttgtaatatggacctggggtacctttagttagggactctggtggcactacacggggtgctggattcaaatctcacctctatggatgatgtctggcatcgtctggcccctccttttccaaagtgaccagaagattgtacttcctagagatgccagacttgcctcacacccaggagctgcccctgctgtgcctggtatgctggcagtggtgatggtgacaacacaatgaggccaagtagcaatgctcccaggtcctgcagcttgtgctctgcccagcagtgcccctggcccagcacctcagcctgctcttctctctggtggctccaccccaacccctacttcttttcctttatttctctcccaacctggctgcaaaggaggttcatattccccagatgtgtccacaaacctgtccaggagttgtgtcttaaaattgatttcctgtccctcttcctaaggacaggggtaacagtcaaagtgaaggaatgatgggttcttgcctgtcttgctttggtccgtatttcccaagccctcctcttttagccaaggctacagggcacttgtcttccctggtggctctcccctttggagagagctagtggcagagcaacctagctaggtcctccttgggctttgaatgcaggagcacccagtgccccaggccttgcactgtgctgcccaaggagtattttctgggtggatctcccatactcctcagggttctgaggtccttgtatttagggtatggtgtaaaaacttacatatgcacattttgttacatcatttaagatgattgaagctttactggttaagtatagggtcaccagagaaagttcctttccccagttgatgtcttgaggctgttgagaaacttaggacagaagcctacctcatcccaggcctgcccctccgtgcatagctctgcctttgggtcttgttcatagtgctgttcaggcaaaatggaatagtctcaggtgggaacaccttctcttgctagctccaggaaggctttgtgggaaatgagttgagaccatggacttgggagttgggggccagagttgagcctggacttgaccaattaattcccttacctttcagcccaagatagctacatgtctttacttgctgtataagttttccttttgtcctgggggtgcctgattgatcctatctcttcacccttcattctttcaacaaacatgccatctatctcccaggacatttattcccttctattcaaggccagttaggaatgcaattatttttttttttcagttaaatacagacttgtttggacgcaaggtaccctttctctttttaaaaactttttatcatgaaaactttcaaatacaaaaataaaatggtagagtgaacctccatg

SEQ ID NO: 6088 - DNA, 2264 bp, Homo sapiens
gagagtgtcctgcctggtcctctgtgcctggtggggtgggggtgccaggtgtgtccagaggagcccagttggtagtgaggcagccatggggctagaagcactggtgcccctggccatgatagtggccatcttcctgctcctggtggacctgatgcaccggcaccaacgctgggctgcacgctacccgccaggtcccctgccactgcccgggctgggcaaccttgctgcatgtggacttccagaacacaccatactgcttcgaccagttgcggcgccgcttcggggacgtgttcagcctgcagctggcctggacgccggtggtcgtgctcaatgggctggcggccgtgcgcgaggcgatggtgacccgcggcgaggacacggccgaccgcccgcctgcgcccatctaccaggtcctgggcttcgggccgcgttcccaaggggtgatcctgtcgcgctatgggcccgcgtggcgcgagcagaggcgcttctccgtgtccaccttgcgcaacttgggcctgggcaagaagtcgctggagcagtgggtgaccgaggaggccgcctgcctttgtgccgccttcgccgaccaagccggacgcccctttcgccccaacggcctcttggacaaagccgtgagcaacgtgatcgcctccctcacctgcgggcgccgcttcgagtacgacgaccctcgcttcctcaggctgctggacctagctcaggagggactgaaggaggagtcgggcttcctgcgcgaggtgctgaatgctgtccccgtcctcccgcacatcccagcgctggctggcaaggtcctacgcttccaaaaggctttcctgacccagctggatgagctgctaactgagcacaggatgacctgggacccagcccagccaccccgagacctgactgaggccttcctggcaaagaaggagaaggccaaggggagccctgagagcagcttcaatgatgagaacctgcgcatagtggtgggtaacctgttccttgccgggatggtgaccacctcgaccacgctggcctggggcctcctgctcatgatcctacacctggatgtgcagctccgtgtccaacaggagatcgacgacgtgatagggcaggtgcggcgaccagagatgggtgaccaggctcacatgccctgcaccactgccgtgattcacgaggtgcagcgctttggggacatcatccccctgagtgtgacccatatgacatcccgtgacatcgaagtacagggcttccgcatccctaagggaacgacactcatcaccaacctgtcatcggtgctgaaggatgaggccgtctggaagaagcccttccgcttccaccccgaacacttcctggatgcccagggccactttgtgaagccggaggccttcctgcctttctcagcaggccgccgtgcatgcctcggggagcccctggcccgcatggagctcttcctcttcttcacctccctgctgcagcacttcagcttctccgtggccgccggacagccccggcccagccactctcgtgtcgtcagctttctggtgaccccatccccctacgagctttgtgctgtgccccgctagaatggggtacctagtccccagcctgctccctagccagaggctctaatgtacaataaagcaatgtggtagttccaacttgggtcccctgctcacgccctcgttgggatcatcctcctcagggcaaccccacccctgcctcattcctgcttaccccaccgcctggccgcatttgagacgggtacgttgaggctgagcagatgtcagttacccttgcccataatcccatgtcccccactgacccaactctgactgcccagattggtgacaaggactacattgtcctggcatgtggggaaggggccagaatgggctgactagaggtgtcagtcagccctggatgtggtggagagggcaggactcagcctggaggcccatatttcaggcctaactcagcccaccccacatcagggacagcagtcctgccagcaccatcacaacagtcacctcccttcatatatgacaccccaaaatggaagacaaatcatgtcagggagctatatgccagggctacctcccagggctcagtcggcaggtgccagaacattccctgggaaggccccaggaaaacccaggaccgagccaccgccctcagcctgtcaccttgtgtccaaaattggtgggttcttggtctcactgacttcaagaatgaagccgtggaccctcacggtgagtgttacagttctt

SEQ ID NO: 6089 - DNA, 2122 bp, Homo sapiens
acaccatcctcttagttgctcagactgaaaacctagcagccatcctggatttctctcacactgcctattcaacgtgtgaatgcatgagtggaaagctgagttcgcactcgtgactggccggggtcaactctgacattcgctcccactttcgcgcgctgatttatctctgagcggatgaaggttgggccatggcgggcggggccggggaggcgggcttggagtgagggggcggggcaggcgccacgaaaacgcgctcgcgccggcgccgaaccgcaactcccggcggcccccgcgctcccgggtggcaagatggtggcgcgcaggaggaagtgcgccgcgcgggacccggaggaccgtatccccagcccactgggctacgcagctattccaatcaagttctctgaaaagcaacaggcttctcactacctctatgtgagagcacacggcgttcgacaaggcaccaagtccacctggcctcagaagaggactctttttgtcctcaatgtgcccccatactgcacagaggagagcctgtcccgcctcctgtccacctgtggcctcgtccagtctgtagagttgcaggagaagccggacctggctgagagcccaaaggagtcaaggtcgaagttttttcatcccaagccagttccgggtttccaggtagcctatgtggtgttccagaagccaagtggggtgtcagcggccttggccctgaagggccccctgctggtgtccacagagagccaccctgtgaagagtggcattcacaagtggatcagtgactacgcagactctgtgcccgaccctgaggccctgagggtggaagtggacacgttcatggaggcatatgaccagaagatcgctgaggaagaagctaaggccaaggaggaggagggggtccctgacgaggagggctgggtgaaggtgacccgccggggccggcggcctgtgctcccccggactgaggcagccagcttgcgggtgctggagagggagagacggaagcgcagccgaaaagagctgctcaacttctacgcctggcagcatcgagagagcaagatggagcatctagcgcagctgcgcaagaagttcgaggaggacaagcagaggatcgagctgctgcgggcccagcgcaaattccgaccgtactgagctgtgagagccgcagtgaatggctggaggtgcagggccaggaggaggcgaggcagggcctgcagcggtctctgagaggccgagctctggccaacgggccccaggttgaaggccaccgcgtccaacagccccatcagagtccacacaggccaggagggaaggaccaggccacccctcgggtcttgtgcttcagcagtcctggggacccaggcgtgccgagaggaggacttgtccttcctgcttcttgcctccacaccctcctctccaggaccctggatgaatccgttctgtgcttccttttccctcaatgcaaaagcccttgctggcaacgaaaaagcctcaaaagcagtgagaatacaagaaccttttattttccatccagttgggcagcagggaaaggctaggtgggcccagcccgcccttccttcctccagctggctggagattattagccaggagacagcagccctggaacccagactctgtctcccccttgaggtcacagatgttgaagttggaatctcgctccttcccctgactaccatcctaggctgggcctcaagactagtgaggcctgtccccaccatccctggccttgttgtggggctcaggaactcagagtcccagtgttgagtctgggagcactaggtcttcatagttccaggcccagagctacagctgggctgggagcgtgtgtgtgcactgtaagaaggagctgatgatactggccacgtgctggggttcgctcatgtggacacagtgattgcctgggacttccacaaactggaaccgctctttgagggtggatttcattgtgtctatcatgaacgacagggactccttgtcagagtaattctctcttggatcaaaatatccgtggactgctttgatcaacaggacatgggcctgcagcttcctgatggaatgcgcacacagctccctgctgacgaagtcaatgctgttctctgcc

SEQ ID NO: 6090 - DNA, 5732 bp, Homo sapiens
cgatgaagtgcaaccttcacatgaatgggaatgttatcacctcagaccagcccatcctgctgtgagttccaaaggcggggtgctggggagaggcagctccgtccatctctttttgttctaatgggtaaactgcctgcatcacagctccccttcatccccccattccgtttcctctgttctaatggcagctggccgtttcatatgcttaaacttgaccaaaatggtttgctttgttatttccccagggcttgaccctatagggactagcattatgatctcgttctcagctttctgatttagaaatatctgagtggaagttggagggggaggctgcttgggtctcctagctgtgtgcatcatcccgggaacagagaactccactgcatgattggctctgatggagacagtgccagatgctaccccttattttgttccccagtgaggttttttgtttgtttgtttgtttgtttgttttttgctttttcagttattttgagagtctcactgtgttgcccaggttggtttcaaactcctggggtcaagcaaccctctcccctcagcctcctgaggacctgggactataggcgcacaccatcacgcccagctggatttggcttttaagtacagtgggaagccattgaaggcttttgttgcacacagctgagtatacatgcctggcccaggactgagggatgttttgaagcctgagatgcataaaatgttgagactgtgaggacttcaccttctagataaggaagcagataccagggaggaggttagacttgccagggtgagtgggatagtgtggggcagggctgaaatagactttgagatttaaaaagactaggatttgaaccctgggtaatgaattatgtgatttggataagttcttaaactgtgttcaaggaataagaaatatttcttagggttttgtaacctaataagtttgggaactactgggctaaacagagttacatctgtttcactttcgggcttctcagattgtgtaatatgctaatggatgttaccatccagaaggaacatgcagtgtttcctaaacttaaaaccacaattagccaggtgtggtggcatgcacctatagtcccagttacttggggggccgaggtgggaggatcgcttgagcctggaagatcgagactagtgagccatcatcatgccactgcacttcagcctgggtgacagagtgagattctgtctcaaaaaaaccccacaaaaccctagaacatacagcactgcctgcgtctccattttctcatcagtaaataagaaaaacacagcctgggccacatagcaagacctggtctctacaaaaaattttaaaaatgagccaggcatggtggtacacgcctgtagtcctagctccttaggaggctgtggcaggagaactgcttgagcctaggagatggaggctgatgtgagctgtgattgagtttgctgcgaggtggaatgagatgaaggggtatggaaagtgttacacccagtgcctagctcatgacagatgcccagtaaatggtgggtcccctccccatctaaggaaaaactgacaagaatttttgactcttctctgctctccacaggcggctgagtgacagcccatcaatgaaaaaggagagcgagctgcctcgcagggtgaactctgcctcctcctccaacccccctgccgaagtggaccctgacaccatcctgaaggcactcttcaagtcctcaggggcctctgtgaccacgcagcccacagaattcaaaatcaagctttgagcaggggagtgaggcagccagaagtgggggcagaggagggtggctctgtttccccaaggcaaagcttatgaccaatgggccatcggactggagacccctgattgtgggaagggttgccagggataaagagcttcctcactggatgggacccgcctttctgtgttgtgttctgccctgtgctcttctctctacgttaacgtttcctgtagtatgtttcttcatctcatcgccaaggtaggcttgtgtttttcagtgtgtgcctccccgagcctcagccccaagctgatttcttatctggaaatggtacactgaattctctgggtggctttcttgtggccccatgggatgcagcgtgggggctgtctgaaggaccctgctttttccaggggccgaggggctgcctttcctttgtgtgtattaagcttttcaaacaatggaggggatggagagccctggtgtcctgacgggagccaggtcggcctgagagctgtgccgctcctctgtcttgtcagtggaggtgcctgggtggggagcaggtctcaggcctcttgtcctctccccagtggctccaggcctcactagtggcaagggcaggatgaggctgcaccgctgggaagagtctatctaagctcttggcttggagtcccgtgtcgtctccacccagaggaagttctccagagttcacctttcccttttccttgagttgtgctgaatgccccaccccagctctctttcccttctgggtgtctttgctgggagggggctgtgttgtgagccctcccggttctcacctcgcctggcacttaaccacaccctggttttgtgtagccgccagctctcttctggttgggcctttgaaaggctcagcctcccattgtgcagtgcttgggtttggagcttatttgaatggaagaggtcagtttgttcctggctctccatttctggcctcagttgtctacaggacagtggtcagggatgcctggaggcatatatccagctgccaccaaggggcactgtttgttcccacttatgtgagtgaccccatccatccatgaccagaggattattttcctgccttggcagaggaggaggagtcaagggagcagggcagctctaccaggcaaggtgtttccccagcataggcgcagacagttgggacgaaacttcagagcccaggcagtccctgaatgaccaggccagtgttgtcactgagtggtcccctgctggttgggagtgaagagaatccaggctggcagagctggagccagttggggagcacggttctgggagctctgcaaaatcagtagcaagtgctggaaaaggcacatgccgaagatactcaagagctcccaagatttgcttgaggctagcccagtgaaaaaaaccagagactcatgtttccaggggtcagtctgtcaggcaggaaggacccaggatttgaacccagcttcagtgtgcaggctctgaggctgcccaggacgggaaagtccaaggaaggggcctggtggtgctccacttgcagttctttaaagaatgctgctttttattctcctaaccctttcaagtgggtgcagacttctcgttagcagctggaagacattcctcccacacttttcccttcctggcccaagagagcatccagaaggcagtaggacctggtttttcaggtactgggagccgggggctcactgcttgcactgtgcttagggtagggatggtaaatatcctccctgcatggctttatcctccctctcatcccaaagcaggtatcttctggttgtcacagagtttcattgagtccagctgcagccacgtggccatctggagctggtgctataggtgaccatctggtacattgaggggacctgtttgcctcctccactctataagcagtcatcttgggagaccgggaggagaaggtggtgggctagtcctgtgtcctcctccacttcccatgcctctatgttacccatctgtgtctcctgtgcagaaggagaggaaggggcattaagagatgaagggtgattatgtattacttatccatttctgaataaacatttgttattcctacctttgagttatcttttttttttttttttttttttttttgagacaaagtctcactctgttgccaaggctggagtgcagtggcactatctcagctcactgcaacctccgcagccagactcaagtaatcctcccacctcagcctcccaattagctgggactgcaggcgtgcatcaccatgtctggctaatttttgtagagatgaggtttcaccatgttgcacaagctggtcttgaaatcctgacctcaggtggtctgcctgcctcggcctcccaaagttggaattaacaggcgtgagccaccacgcccagccaagggttttaatcttgcagggatttcaacatttggggtggaacttaattatttaaaaaatagagacagattcttgctatgatacccaggatggtcttgaactcctgggcacaagtgatcctcctgcttcagcctctcaaagtgttggagttacaggcatgagccactgctccccaccagggatgcaaattacttgatactcctctccagaaggtggggtcctgtgcccctcctgaacccaagtgtgctctgttactactttgaccagatgtgactctgccatttctgtgcctaggcttttaaagatggtcacttctccatttcctgtgcctggaacattctctgggagccttgacaccacatttgaagttgcctattggggccagcatggtggctcacgcctgtaatcccagcacttcagaaggccgaggcaggcagatcgcatgaaatcaggagtttgagaccagcctaaccaacgtggtaaaaccctgtctctactaaaaattacaaaaattagaggggcgcggtggtgggcgcttgtaatcccagctattcaggaggctgaggcaggagaatcacttgaacccgggaggcggagtttgcagtgaggtgaaatcacgccactgcactccagcctgtgcaacagagcgaggctctgtctcaaaagaaaaaaaatagttgactgtcggtttggcatggtggctcatgcctcttgtcccagcactttgggatgctgaggcaggaagattactggagctcaggagttcgagaccagcttgggcaatatagtgaagccctatctttacaaaaaacgaaaaattagctcagctactcaggagcctgaaatggaggatcatttgtgcccaggaggcagaggtcgcagtgagctgtgatcatgccactatactccatcctgggcaacacagtgagacggcagaaaaaaaaaaatagttgactattgagtctcatatctgattgcccacctgacatctcccctgagtggcctaatgggcatctcaccacggcccacagagaactgatctactcgattttccctaagctggcccctctcctgcagtctacccatgtcagtcaatggcaacaccatcctcttagttgctcagactgaaaagctagcagccatcctggatttctctcacactgcctattcaacgtgtgaatgcatgagtggaaagctgagttcgcactcgtgactggccggggtcgactctgacattcactcccactttggcgcgctgatttgcctctgagcggatgaaggttgagccatggcgggcggggccggggaggcgggcttggagcgagggggcggggcaggcgccacaaaaacgcgctcgcgccggcgccgaaccgcaactcccggcgacccccgcgctcccgggtggcaagatggtggcgcgcaggacgaagctcgcggcgcgggacccggaggacggtatcccgagcccaccgtgctacgcaggtgaggggatccggaacgcgagaccgggggcggccagcatcgccgggaggtgtttgggggctggcggcggccgggggtccccaggagcggccgc

SEQ ID NO: 6091 - DNA, 3439 bp, Homo sapiens
cgagagttggtccgcggacgccggaagtagttcgtcgctccctagcggccgaaggggcgggctcgcggggtctcgactgctttcggcttgctcggcggagcaagatggcggacatctccctggacgaactcatcaggaagcgcggggcggcggcgaaaggacggcttaatgccagaccgggagttggaggtgtccgatctcgagttgggatccagcaaggccttctcagccagtcaacacgcacagccaccttccagcagagatttgatgcccggcagaagattggcctctcagatgcccggctcaaactgggagtcaaggatgcccgggagaagcttttgcagaaagatgcccgatttcgaatcaaagggaaagtgcaggatgccagagagatgttgaactctcgcaagcagcagaccacggtgccccagaagccccgccaggttgctgatgcccgggagaagatcagcttgaagaggagttcccctgctgccttcataaacccacccattgggacagtgacccctgctctgaagctcaccaaaaccatccaggttccacagcagaaagccatggcaccacttcatccccatcctgccggaatgagaatcaatgttgtcaataaccaccaggccaaacagaatttatatgacctggatgaagatgatgatggtatagcttccgttcctactaaacagatgaagtttgcagcctcaggcggctttctccaccacatggctgggctaagcagttccaagctttccatgtccaaggccctccctctcaccaaagtggttcagaatgatgcatacacagctcctgctctcccttcctctattcgaacaaaagccttgaccaacatgtcccggacactggtgaacaaggaagaaccccccaaagagctgccagctgctgagcctgttctcagcccattggaaggcaccaagatgactgtgaataatctgcaccctcgagtcactgaggaggacattgttgagcttttctgtgtgtgtggggccctcaagcgagctcgactggtccatcctggggtagcggaggtggtgtttgtgaaaaaggacgatgccatcaccgcatataagaagtacaacaaccggtgtctggacgggcagccgatgaagtgcaaccttcacatgaatgggaatgttatcacctcagaccagcccatcctgctgcggctgagtgacagcccatcaatgaaaaaggagagcgagctgcctcgcagggtgaactctgcctcctcctccaacccccctgccgaagtggaccctgacaccatcctgaaggcactcttcaagtcctcaggggcctctgtgaccacgcagcccacagaattcaaaatcaagctttgagcaggggagtgaggcagccagaagtgggggcagaggagggtggctctgtttccccaaggcaaagcttatgaccaatgggccatcggactggagacccctgattgtgggaagggttgccagggataaagagcttcctcactggatgggacccgcctttctgtgttgtgttctgccctgtgctcttctctctacgttaacgtttcctgtagtatgtttcttcatctcatcgccaaggtaggcttgtgtttttcagtgtgtgcctccccgagcctcagccccaagctgatttcttatctggaaatggtacactgaattctctgggtggctttcttgtggccccatgggatgcagcgtgggggctgtctgaaggaccctgctttttccaggggccgaggggctgcctttcctttgtgtgtattaagcttttcaaacaatggaggggatggagagccctggtgtcctgacgggagccaggtcggcctgagagctgtgccgctcctctgtcttgtcagtggaggtgcctgggtggggagcaggtctcaggcctcttgtcctctccccagtggctccaggcctcactagtggcaagggcaggatgaggctgcaccgctgggaagagtctatctaagctcttggcttggagtcccgtgtcgtctccacccagaggaagttctccagagttcacctttcccttttccttgagttgtgctgaatgccccaccccagctctctttcccttctgggtgtctttgctgggagggggctgtgttgtgagccctcccggttctcacctcgcctggcacttaaccacaccctggttttgtgtagccgccagctctcttctggttgggcctttgaaaggctcagcctcccattgtgcagtgcttgggtttggagcttatttgaatggaagaggtcagtttgttcctggctctccatttctggcctcagttgtctacaggacagtggtcagggatgcctggaggcatatatccagctgccaccaaggggcactgtttgttcccacttatgtgagtgaccccatccatccatgaccagaggattattttcctgccttggcagaggaggaggagtcaagggagcagggcagctctaccaggcaaggtgtttccccagcataggcgcagacagttgggacgaaacttcagagcccaggcagtccctgaatgaccaggccagtgttgtcactgagtggtcccctgctggttgggagtgaagagaatccaggctggcagagctggagccagttggggagcacggttctgggagctctgcaaaatcagtagcaagtgctggaaaaggcacatgccgaagatactcaagagctcccaagatttgcttgaggctagcccagtgaaaaaaaccagagactcatgtttccaggggtcagtctgtcaggcaggaaggacccaggatttgaacccagcttcagtgtgcaggctctgaggctgcccaggacgggaaagtccaaggaaggggcctggtggtgctccacttgcagttctttaaagaatgctgctttttattctcctaaccctttcaagtgggtgcagacttctcgttagcagctggaagacattcctcccacacttttcccttcctggcccaagagagcatccagaaggcagtaggacctggtttttcaggtactgggagccgggggctcactgcttgcactgtgcttagggtagggatggtaaatatcctccctgcatggctttatcctccctctcatcccaaagcaggtatcttctggttgtcacagagtttcattgagtccagctgcagccacgtggccatctggagctggtgctataggtgaccatctggtacattgaggggacctgtttgcctcctccactctataagcagtcatcttgggagaccgggaggagaaggtggtgggctagtcctgtgtcctcctccacttcccatgcctctatgttacccatctgtgtctcctgtgcagaaggagaggaaggggcattaagagatgaagggtgattatgtattacttatccatttctgaataaacatttgttattcct

SEQ ID NO: 6092 - protein, 421 aa, Homo sapiens
MADISLDELIRKRGAAAKGRLNARPGVGGVRSRVGIQQGLLSQSTRTATFQQRFDARQKIGLSDARLKLGVKDAREKLLQKDARFRIKGKVQDAREMLNSRKQQTTVPQKPRQVADAREKISLKRSSPAAFINPPIGTVTPALKLTKTIQVPQQKAMAPLHPHPAGMRINVVNNHQAKQNLYDLDEDDDGIASVPTKQMKFAASGGFLHHMAGLSSSKLSMSKALPLTKVVQNDAYTAPALPSSIRTKALTNMSRTLVNKEEPPKELPAAEPVLSPLEGTKMTVNNLHPRVTEEDIVELFCVCGALKRARLVHPGVAEVVFVKKDDAITAYKKYNNRCLDGQPMKCNLHMNGNVITSDQPILLRLSDSPSMKKESELPRRVNSASSSNPPAEVDPDTILKALFKSSGASVTTQPTEFKIKL

SEQ ID NO: 6093 - DNA, 843 bp, Homo sapiens
ccatatggtgctcttcccagtctggttcctgtacagtctgctcatgaagctgttccagcgctccacgccagccatcaccctcgagagcccgggttcagcctggcctgcccgtgccctggtgaatcacctggctgagcagttcccctggagccccttcgggagcagggctgtgtcccagatgggccacggctgagccttcagagtacgtcctgcctggcacttactggtccttaccagagacgcccagccccatccctgtcctcatgacccctcgtccaccccccacacacactataaggctgagggctgccagcagccccgtctgcccaccattcccggccgtggaccatagtcgggatgtcagcagacacacatgggcagcccaaagctgcaggtgccagggcccaccccagcctcgcctgtcacccccactcccgcctcagggccaggcccaggcctcaccacctgacgctgcatgagacattgacaccagaaagccctcttgggggcactgctccctaccccagggccctggccagccgggagcttggctctcctctggctagagtgggaagagggggctggccatggggtcctgggctggggccaccatccctgatggcagaactcccacaaccacatgtatttattcctctgtcctaaaccgtcccctccttccctcacccccagcacagggggattctgagcagtgcctcttgtctgagggacatatcagtgacctcgacgttgcctttagactacagttgtgttagcctcttgcgtattggctttttcagagtcatttatgagcagaaaaaaaaaaagtaaaactttgctaatatt

SEQ ID NO: 6094 - DNA, 1922 bp, Homo sapiens
cgcgacggtctcggcggcggcggcggcggcgacagagcgagcgcggcgcggggccaccatgggggcccagctcagcacgttgggccatatggtgctcttcccagtctggttcctgtacagtctgctcatgaagctgttccagcgctccacgccagccatcaccctcgagagcccggacatcaagtacccgctgcggctcatcgaccgggagatcatcagccatgacacccggcgcttccgctttgccctgccgtcaccccagcacatcctgggcctccctgtcggccagcacatctacctctcggctcgaattgatggaaacctggtcgtccggccctatacacccatctccagcgatgatgacaagggcttcgtggacctggtcatcaaggtttacttcaaggacacccatcccaagtttcccgctggagggaagatgtctcagtacctggagagcatgcagattggagacaccattgagttccggggccccagtgggctgctggtctaccagggcaaagggaagttcgccatccgacctgacaaaaagtccaaccctatcatcaggacagtgaagtctgtgggcatgatcgcgggagggacaggcatcaccccgatgctgcaggtgatccgcgccatcatgaaggaccctgatgaccacactgtgtgccacctgctctttgccaaccagaccgagaaggacatcctgctgcgacctgagctggaggaactcaggaacaaacattctgcacgcttcaagctctggtacacgctggacagagcccctgaagcctgggactacggccagggcttcgtgaatgaggagatgatccgggaccaccttccacccccagaggaggagccgctggtgctgatgtgtggccccccacccatgatccagtacgcctgccttcccaacctggaccacgtgggccaccccacggagcgctgcttcgtcttctgagggccgggcacggtcacacggccacccgccccgcgcaccccacgccctgttcacgctcacccagtcacctccccacatcgcacactggggccccgggttcagcctggcctgcccgtgccctggtgaatcacctggctgagcagttcccctggagccccttcgggagcagggctgtgtcccagatgggccacggctgagccttcagagtacgtcctgcctggcacttactggtccttaccagagacgcccagccccatccctgtcctcatgacccctcgtccaccccccacacacactataaggctgagggctgccagcagccccgtctgcccaccattcccggccgtggaccatagtcgggatgtcagcagacacacatgggcagcccaaagctgcaggtgccagggcccaccccagcctcgcctgtcacccccactcccgcctcagggccaggcccaggcctcaccacctgacgctgcatgagacattgacaccagaaagccctcttgggggcactgctccctaccccagggccctggccagccgggagcttggctctcctctggctagagtgggaagagggggctggccatggggccctcccagaacctcagcatttccttccagcccatccaaacactgaggcagccttggggaaccccgagctggggggttggcagcccactgcaccgcctcagggttttggggtcctgggctggggccaccatccctgatggcagaactcccacaaccacatgtatttattcctctgtcctaaaccgtcccctccttccctcacccccagcacagggggattctgagcagtgcctcttgtctgagggacatatcagtgacctcgacgttgcctttagactacagttgtgttagcctcttgcgtattggctttttcagagtcatttatgagcagaaaaaaaaaaagtaaaactttgctaatatt

SEQ ID NO: 6095 - DNA, 636 bp, Homo sapiens
agcggcctggctaactcctgccaggcagtgcccttcccggagcgtgccctcgccgctggtacggctcctacctggtctggaaagagctgggaggcttcacagagaaggctgtggttcccctgggcctctacactgggcagctggccctgaactgggcatggccccccatcttctttggtgcccgacaaatgggctgggccttggtggatctcctgctggtcagtggggcggcggcagccactaccgtggcctggtaccaggtgagcccgctggccgcccgcctgctctacccctacctggcctggctggccttcgcgaccacactcaactactgcgtatggcgggacaaccatggctggcatgggggacggcggctgccagagtgagtgcccggcccaccagggactgcagctgcaccagcaggtgccatcacgcttgtgatgtggtggccgtcacgctttcatgaccactgggcctgctagtctgtcagggccttggcccaggggtcagcagagcttcagaggttgccccacctgagcccccacccgggagcagtgtcctgtgctttctgcatgcttagagcatgttcttggaacatggaattttataagctgaataaagtttttgacttccttt

SEQ ID NO: 6096 - protein, 102 aa, Homo sapiens
MAPHLLWCPTNGLGLGGSPAGQWGGGSHYRGLVPGEPAGRPPALPLPGLAGLRDHTQLLRMAGQPWLAWGTAAARVSARPTRDCSCTSRCHHACDVVAVTLS

SEQ ID NO: 6097 - DNA, 3321 bp, Homo sapiens
atggaggccgagcggggtcccgagcgccggcctgcggagcgtagcagcccgggccagacgccggaggagggcgcgcaggccttggccgagttcgcggcgctgcacggcccggcgctgcgcgcttcgggggtccccgaacgttactggggccgcctcctgcacaagctggagcacgaggttttcgacgctggggaagtgtttgggatcatgcaagtggaggaggtagaagaggaggaggacgaggcagcccgggaggtgcggaagcagcagcccaacccggggaacgagctgtgctacaaggtcatcgtgaccagggagagcgggctccaggcagcccaccccaacagcatcttcctcatcgaccacgcctggacgtgccgtgtggagcacgcgcgccagcagctgcagcaggtgcccgggctgctgcaccgcatggccaacctgatgggcattgagttccacggtgagctgcccagtacagaggctgtggccctggtgctggaggagatgtggaagttcaaccagacctaccagctggcccatgggacagctgaggagaagatgccggtgtggtatatcatggacgagttcggttcgcggatccagcacgcggacgtgcccagcttcgccacggcacccttcttctacatgccgcagcaggtggcctacacgctgctgtggcccctgagggacctggacactggcgaggaggtgacccgagactttgcctacggagagacggaccccctgatccggaagtgcatgctgctgccctgggcccccaccgacatgctggacctcagctcttgcacacccgagccgcccgccgagcactaccaggccattctggaggaaaacaaggagaagctgccacttgacatcaaccccgtggtgcacccccacggccacatcttcaaggtctacacggacgtgcagcaggtggccagcagcctcacccacccgcgcttcaccctcacccagagtgaggcggacgccgacatcctcttcaacttctcacacttcaaggactacaggaaactcagccaggagaggccaggcgtgctgctgaaccagttcccctgcgagaacctgctgactgtcaaggactgcctggcctccatcgcgcgccgggcaggtggccccgagggcccaccctggctgccccgaaccttcaacctgcgcactgagctgccccagtttgtcagctacttccagcagcgggaaaggtggggcgaggacaaccactggatctgcaagccctggaacctggcgcgcagcctggacacccacgtcaccaagagcctgcacagcatcatccggcaccgagagagcacccccaaggttgtgtccaagtacatcgaaagtcccgtgttgttccttcgagaagacgtgggaaaggtcaagttcgacatccgctacatcgtgctgctgcggtcagtgaggcccctacggttgttcgtgtatgatgtgttctggctgcggttctccaaccgggcctttgcactcaacgacctggatgactacgagaagcacttcacggtcatgaactatgacccggatgtggtgctgaagcaggtgcactgtgaagagttcatccccgagtttgagaagcaatacccagaatttccctggacggacgtccaggctgagatcttccgggccttcacggagctgttccaggtggcctgtgccaagccaccacccctgggcctctgcgactacccctcatcccgggccatgtatgccgtcgacctcatgctgaagtgggacaacggcccagatggaaggcgggtgatgcagccgcagatcctggaggtgaacttcaaccccgactgtgagcgagcctgcaggtaccaccccaccttcttcaacgacgtcttcagcaccttgtttctggaccagcccggtggctgccacgttacctgccttgtctaggcactcgctgtccccaaaacctgtgcttggggcaggattccaacctcagttctctgagctgcttctgcaaaggcccccatgtccctccccacaccggccctgggcatagcctcagccccaggcctctgtcctgccgagccatcctcccggcgccacactccgggagcacagcatcctcctctcacctgtgggtcagagcaggacagtgatggtgtccccagggctgagcaccaccccacgccctgccctcacccctcaccaccatctgtgcactgatgagtctccagtttagccaagggctttgttcctggcatggagaatttgttcctggctgctgtgtttccagggggtgctgggggaagggttccgtggagcgagacaaggtgtcctcgggagcagggttccaccgggaagcgtttgggagccctgtatcacacggggcaggcgggtttctcttccggggtctctgctcttatgcatcaggacgaccccgggacggctgtggggccccacactgcacccacagggctctatgcgacaggggcccaggaacagcctgaggccaccacccagcaagcccgccttatcacccattccagctcacccagaaccttcaccagcaaacctcctgctgaggtcctggcaggaggccaccgtcttgttaccgtttccttttcgtttgctgagggtcacagaccccaacagggaaatcagtatctgtcttcccagtggttgccctgctcgccgggcactccacggggtcccgcccttgtgtgagatgggccaggatccttcggcaaggggcgcctggggctggggctgattgtgggcggtggagcgccagacagaaaaggattccaatgagaacttcaggttaaagtcagatgccacctaccagggtctacagtcaaaatgttggctttttcttattttttaatgtatgggagaaaaatgtaaaattccagttcttttctaattgtgtttctgaaattaggagtcagctgccagcgtttttgtgtggctgcagtgtgcctgggcccagctcacgggcagtgggtggacctaactgcccaggcaggcgagagctacttccagagccttccagtgcatgggagggcagggctaggtgtagcggtgtctcctctttgaaattaagaactatctttcttgtagcaaagctgcacctgatgatgctgcctctcctctctgtgttgtctgggcccttgtttacaagcacgcgttacccttcctgaggggagccatgctctagcccctggagggcctgttgcaggggcagggcgggcccgtcgcctttggcagctcctggagagctgtggacatgcagtccccctcagttcgtgctgcaataaaggccatcttctctta

SEQ ID NO: 6098 - protein, 644 aa, Homo sapiens
MEAERGPERRPAERSSPGQTPEEGAQALAEFAALHGPALRASGVPERYWGRLLHKLEHEVFDAGEVFGIMQVEEVEEEEDEAAREVRKQQPNPGNELCYKVIVTRESGLQAAHPNSIFLIDHAWTCRVEHARQQLQQVPGLLHRMANLMGIEFHGELPSTEAVALVLEEMWKFNQTYQLAHGTAEEKMPVWYIMDEFGSRIQHADVPSFATAPFFYMPQQVAYTLLWPLRDLDTGEEVTRDFAYGETDPLIRKCMLLPWAPTDMLDLSSCTPEPPAEHYQAILEENKEKLPLDINPVVHPHGHIFKVYTDVQQVASSLTHPRFTLTQSEADADILFNFSHFKDYRKLSQERPGVLLNQFPCENLLTVKDCLASIARRAGGPEGPPWLPRTFNLRTELPQFVSYFQQRERWGEDNHWICKPWNLARSLDTHVTKSLHSIIRHRESTPKVVSKYIESPVLFLREDVGKVKFDIRYIVLLRSVRPLRLFVYDVFWLRFSNRAFALNDLDDYEKHFTVMNYDPDVVLKQVHCEEFIPEFEKQYPEFPWTDVQAEIFRAFTELFQVACAKPPPLGLCDYPSSRAMYAVDLMLKWDNGPDGRRVMQPQILEVNFNPDCERACRYHPTFFNDVFSTLFLDQPGGCHVTCLV

SEQ ID NO: 6099 - DNA, 1714 bp, Homo sapiens
gcggggaatcatggccgcccccagtgttccgcgtccgggggtttgtgggagttgccttgacctgcagctccgccaccgcggacccgccttctgccctcagcagcagacgctctgtcccgcccgggcagctctgcgaggcagcggctggagagggaaccatggggactgtgcacgcccggagtttggagcctcttccatcaagtggacctgattttggaggattaggagaagaagctgaatttgttgaagttgagcctgaagctaaacaggaaattcttgaaaacaaagatgtggttgttcaacatgttcattttgatggacttggaaggactaaagatgatatcatcatttgtgaaattggagatgttttcaaggccaaaaacctaattgaggtaatgcggaaatctcatgaagcccgtgaaaaattgctccgtcttggaatttttagacaagtggatgttttgattgacacatgtcaaggtgatgacgcacttccaaatgggttagacgttacctttgaagtaactgaattgaggagattaacgggcagttataacaccatggttggaaacaatgaaggcagtatggtacttggcctcaagcttcctaatcttcttggtcgtgcagaaaaggtgacctttcagttttcctatggaacaaaagaaacttcgtatggcctgtccttcttcaaaccacggcccggaaacttcgaaagaaatttctctgtaaacttatataaagttactggacagttcccttggagctcactgcgggagacggacagaggaatgtcagctgagtacagttttcccatatggaagaccagccacactgtcaagtgggaaggcgtatggcgagaactgggctgcctctcaaggacggcgtcatttgctgttcgaaaagaaagcggacattcactgaaatcatctctttcgcacgccatggtcatcgattctcggaattcttccatcttaccaaggagaggtgctttgctgaaagttaaccaggaactggcaggctacactggcggggatgtgagcttcatcaaagaagattttgaacttcagttgaacaagcaactcatatttgattcagttttttcagcgtctttctggggcggaatgttggtacccattggtgataagccgtcaagcattgctgataggttttaccttgggggacccacaagcatccgcggattcagcatgcacagcatcgggccacagagcgaaggagactacctaggtggagaagcgtactgggccggcggcctgcacctctacaccccattacctttccggccaggccagggtggctttggagaacttttccgaacacacttctttctcaacgcaggaaacctctgcaacctcaactatggggagggccccaaagctcatattcgtaagctggctgagtgcatccgctggtcgtacggggccgggattgtcctcaggcttggcaacatcgctcggttggaacttaattactgcgtccccatgggagtacagacaggcgacaggatatgtgatggcgtccagtttggagctgggataaggttcctgtagccgacacccctacaggagaagctctgggactggggcagcagcaaggcgcccatgccacacaccgtctctcgaggaaacgcggttcagcgattctttgactgcggaccctgtgggaaaccccgtcaataaatgttaaagacacactc

SEQ ID NO: 6100 - protein, 469 aa, Homo sapiens
MGTVHARSLEPLPSSGPDFGGLGEEAEFVEVEPEAKQEILENKDVVVQHVHFDGLGRTKDDIIICEIGDVFKAKNLIEVMRKSHEAREKLLRLGIFRQVDVLIDTCQGDDALPNGLDVTFEVTELRRLTGSYNTMVGNNEGSMVLGLKLPNLLGRAEKVTFQFSYGTKETSYGLSFFKPRPGNFERNFSVNLYKVTGQFPWSSLRETDRGMSAEYSFPIWKTSHTVKWEGVWRELGCLSRTASFAVRKESGHSLKSSLSHAMVIDSRNSSILPRRGALLKVNQELAGYTGGDVSFIKEDFELQLNKQLIFDSVFSASFWGGMLVPIGDKPSSIADRFYLGGPTSIRGFSMHSIGPQSEGDYLGGEAYWAGGLHLYTPLPFRPGQGGFGELFRTHFFLNAGNLCNLNYGEGPKAHIRKLAECIRWSYGAGIVLRLGNIARLELNYCVPMGVQTGDRICDGVQFGAGIRFL

SEQ ID NO: 6101 - DNA, 996 bp, Homo sapiens
atggagccggagttcttgtacgacctgctgcagctccccaagggggtggagcccccagcggaggaggagctctcaaaaggaggaaagaagaaatacctgccacccacttcccggaaggaccccaaatttgaagaactgcagaaggtgttgatggagtggatcaatgccactcttctccccgagcacattgtggtccgcagcctggaggaggacatgttcgacgggctcatcctacaccacctattccagaggctggcggcgctcaagctggaagcagaggacatcgccctgacagccacaagccagaagcacaagctcacagtggtgctggaggccgtgaaccggagtctgcagctggaggagtggcaggccaagtggagcgtggagagcatcttcaacaaggacctgttgtctaccctgcacctccttgtggccctggccaagcgcttccagcccgacctctccctcccaaccaacgtccaggtggaggtcatcactatcgagagcaccaaaagtggtctgaagtcagagaagttggtggaacagctcactgaatacagcacagacaaggacgagcctccaaaggacgtctttgatgaattatttaagctggctccggagaaagtgaacgcagtgaaagaggccatcgtgaactttgtcaaccagaagctggaccgcctgggcctgtctgtgcagaatctggacacccagtttgcagatggggtcatcttactcttgctgattggacaacttgaaggcttcttcctgcacttaaaggaattctacctcactcccaactctcctgcagaaatgctgcacaacgtcaccctggcgctggagctgctgaaggacgagggcctgctcagctgccctgtcagccctgaagatatcgtgaacaaggatgccaagagcacactgcgggtgctctatggtctgttctgcaagcacacgcagaaggcacacagggacaggacgccccatggagccccgaattga

SEQ ID NO: 6102 - protein, 331 aa, Homo sapiens
MEPEFLYDLLQLPKGVEPPAEEELSKGGKKKYLPPTSRKDPKFEELQKVLMEWINATLLPEHIVVRSLEEDMFDGLILHHLFQRLAALKLEAEDIALTATSQKHKLTVVLEAVNRSLQLEEWQAKWSVESIFNKDLLSTLHLLVALAKRFQPDLSLPTNVQVEVITIESTKSGLKSEKLVEQLTEYSTDKDEPPKDVFDELFKLAPEKVNAVKEAIVNFVNQKLDRLGLSVQNLDTQFADGVILLLLIGQLEGFFLHLKEFYLTPNSPAEMLHNVTLALELLKDEGLLSCPVSPEDIVNKDAKSTLRVLYGLFCKHTQKAHRDRTPHGAPN

SEQ ID NO: 6103 - DNA, 2196 bp, Homo sapiens
ctgagcctctccgtgcaatgattaacccggcggggcggccggcgcgggacccgagacggaggcgcggggccggggcgggaccccgcaggaccgctcggcttcctgctctcgccggagtttccgcgtagagggcgcatcgccggcccggggcccttggtgcggcgtggcgcagggcgcggcgtggggcgcgcgtgggcgcggcgcaggcggcccgggtcaccatgaggactctccgcaggttgaagttcatgagttcgcccagcctcagtgacctgggcaagagagagccggccgccgccgcggacgagcggggcacgcagcagcgccgggcctgcgccaacgccacctggaacagcatccacaacggggtgatcgccgtcttccagcgcaaggggctgcccgaccaggagctcttcagcctcaacgagggcgtccggcagctgttgaagacagagctggggtccttcttcacggagtacctgcagaaccagctgctgacaaaaggcatggtgatccttcgggacaagattcgcttctatgaggagctgcagagagacaaggcggcggcggctgctgtgctgggtgcagtgaggaagaggccctcggtggtgcccatggctggccaggatcctgcgctgagcacgagtcacccgttctacgacgtggccagacatggcattctgcaggtggcaggggatgaccgctttggaagacgtgttgtcacgttcagctgctgccggatgccaccctcccacgagctggaccaccagcggctgctggagtatttgaagtacacactggaccaatacgttgagaacgattataccatcgtctatttccactacgggctgaacagccggaacaagccttccctgggctggctccagagcgcatacaaggagttcgataggaaagacggggatctcactatgtggcccaggctggtctcgaactccaagctcaagcgatcctcccacctcagcctcccaaagtactgggattacaggtacaagaagaacttgaaggccctctacgtggtgcaccccaccagcttcatcaaggtcctgtggaacatcttgaagcccctcatcagtcacaagtttgggaagaaagtcatctatttcaactacctgagtgagctccacgaacaccttaaatacgaccagctggtcatccctcccgaagttttgcggtacgatgagaagctccagagcctgcacgagggccggacgccgcctcccaccaagacaccaccgccgcggcccccgctgcccacacagcagtttggcgtcagtctgcaatacctcaaagacaaaaatcaaggcgaactcatcccccctgtgctgaggttcacagtgacgtacctgagagagaaaggcctgcgcaccgagggcctgttccggagatccgccagcgtgcagaccgtccgcgagatccagaggctctacaaccaagggaagcccgtgaactttgacgactacggggacattcacatccctgccgtgatcctgaagaccttcctgcgagagctgccccagccgcttctgaccttccaggcctacgagcagattctcgggatcacctgtgtggagagcagcctgcgtgtcactggctgccgccagatcttacggagcctcccagagcacaactacgtcgtcctccgctacctcatgggcttcctgcatgcggtgtcccgggagagcatcttcaacaaaatgaacagctctaacctggcctgtgtcttcgggctgaatttgatctggccatcccagggggtctcctccctgagtgcccttgtgcccctgaacatgttcactgaactgctgatcgagtactatgaaaagatcttcagcaccccggaggcacctggggagcacggcctggcaccatgggaacaggggagcagggcagcccctttgcaggaggctgtgccacggacacaagccacgggcctcaccaagcctaccctacctccgagtcccctgatggcagccagaagacgtctctagtgttgcgaacactctgtatatttcgagctacctcccacacctgtctgtgcacttgtatgttttgtaaacttggcatctgtaaaaataaccagccattagatgaattcagaaccttctaatgaaaactccatgcctctggtccttggactcttgtccatggttcctgagctgtggaccgggatagaat

SEQ ID NO: 6104 - DNA, 1850 bp, Homo sapiens
ggcccaggctgaagctcagggccctgtctgctctgtggactcaacagtttgtggcaagacaagctcagaactgagaagctgtcaccacagttctggaggctgggaagttcaagatcaaagtgccagcagattcagtgtcatgtgaggacgtgcttcctgcttcatagataagagcttggagctcggcgcacaaccagcaccatctggtcgcgatggtggacacggaaagcccactctgccccctctccccactcgaggccggcgatctagagagcccgttatctgaagagttcctgcaagaaatgggaaacatccaagagatttcgcaatccatcggcgaggatagttctggaagctttggctttacggaataccagtatttaggaagctgtcctggctcagatggctcggtcatcacggacacgctttcaccagcttcgagcccctcctcggtgacttatcctgtggtccccggcagcgtggacgagtctcccagtggagcattgaacatcgaatgtagaatctgcggggacaaggcctcaggctatcattacggagtccacgcgtgtgaaggctgcaagggcttctttcggcgaacgattcgactcaagctggtgtatgacaagtgcgaccgcagctgcaagatccagaaaaagaacagaaacaaatgccagtattgtcgatttcacaagtgcctttctgtcgggatgtcacacaacgcgattcgttttggacgaatgccaagatctgagaaagcaaaactgaaagcagaaattcttacctgtgaacatgacatagaagattctgaaactgcagatctcaaatctctggccaagagaatctacgaggcctacttgaagaacttcaacatgaacaaggtcaaagcccgggtcatcctctcaggaaaggccagtaacaatccaccttttgtcatacatgatatggagacactgtgtatggctgagaagacgctggtggccaagctggtggccaatggcatccagaacaaggaggcggaggtccgcatctttcactgctgccagtgcacgtcagtggagaccgtcacggagctcacggaattcgccaaggccatcccaggcttcgcaaacttggacctgaacgatcaagtgacattgctaaaatacggagtttatgaggccatattcgccatgctgtcttctgtgatgaacaaagacgggatgctggtagcgtatggaaatgggtttataactcgtgaattcctaaaaagcctaaggaaaccgttctgtgatatcatggaacccaagtttgattttgccatgaagttcaatgcactggaactggatgacagtgatatctccctttttgtggctgctatcatttgctgtggagatcgtcctggccttctaaacgtaggacacattgaaaaaatgcaggagggtattgtacatgtgctcagactccacctgcagagcaaccacccggacgatatctttctcttcccaaaacttcttcaaaaaatggcagacctccggcagctggtgacggagcatgcgcagctggtgcagatcatcaagaagacggagtcggatgctgcgctgcacccgctactgcaggagatctacagggacatgtactgagttccttcagatcagccacaccttttccaggagttctgaagctgacagcactacaaaggagacgggggagcagcacgattttgcacaaatatccaccactttaaccttagagcttggacagtctgagctgtaggtaaccggcatattattccatatctttgttttaaccagtacttctaagagcatagaactcaaatgctgggggaggtggctaatctcaggactgggaag

SEQ ID NO: 6105 - protein, 468 aa, Homo sapiens
MVDTESPLCPLSPLEAGDLESPLSEEFLQEMGNIQEISQSIGEDSSGSFGFTEYQYLGSCPGSDGSVITDTLSPASSPSSVTYPVVPGSVDESPSGALNIECRICGDKASGYHYGVHACEGCKGFFRRTIRLKLVYDKCDRSCKIQKKNRNKCQYCRFHKCLSVGMSHNAIRFGRMPRSEKAKLKAEILTCEHDIEDSETADLKSLAKRIYEAYLKNFNMNKVKARVILSGKASNNPPFVIHDMETLCMAEKTLVAKLVANGIQNKEAEVRIFHCCQCTSVETVTELTEFAKAIPGFANLDLNDQVTLLKYGVYEAIFAMLSSVMNKDGMLVAYGNGFITREFLKSLRKPFCDIMEPKFDFAMKFNALELDDSDISLFVAAIICCGDRPGLLNVGHIEKMQEGIVHVLRLHLQSNHPDDIFLFPKLLQKMADLRQLVTEHAQLVQIIKKTESDAALHPLLQEIYRDMY

SEQ ID NO: 6106 - DNA, 3773 bp, Homo sapiens
caacttccggaaggaggcggaagagcttctcggctctaggctctggagtcccgggagcagtgaggggccacccggggcacaggaaagggccgctaggggagggccgggtgcactcggggtgtctgggccgcgggtctgagggatgaggaggggccatggccagcgacggggccaggaagcaattctggaagcgcagcaacagcaagctcccgggcagcatccagcacgtgtatggtgcccagcaccccccctttgatccactgttacatggcactttgctcaggtccacggccaagatgccgaccacaccagtgaaggccaagagggtcagcaccttccaggagtttgagagcaataccagcgatgcctgggacgctggggaggacgacgatgagctcctggccatggcggcggagagcctgaactccgaggtggtcatggagacggccaaccgtgtgctgcgtaaccacagccagcggcaggggcggcccacgctgcaggaggggccagggcttcagcagaagcccaggcccgaggcagagccgccctcaccccccagcggcgacctccggctggtgaagtcggtcagtgagagccacacgtcctgtcctgcagaaagtgccagcgatgccgcccctctgcagaggtcccagtctctcccacactcggccaccgtcacgctgggtggcacatctgaccccagcactctcagcagctcagcgctgagcgaaagagaggcctcccggctcgacaagttcaagcagctgcttgccggccccaacacggaccttgaggaattacggaggttgagctggtccggaatccctaagccagtgcgtccaatgacgtggaagctcctctcaggttaccttcccgccaatgtagaccggagaccagccactctccagagaaaacaaaaagaatattttgcatttattgagcactattacgattctaggaacgacgaagttcaccaggacacatacaggcagatccacatagacatccctcgcatgagccctgaagcgttgatcctgcagcccaaggtgacggagatttttgaaaggatcttgttcatatgggcgatccgccacccagccagtggatacgttcagggtataaatgatctcgtcactcctttctttgtggtcttcatttgtgaatacatagaggcagaggaggtggacacggtggacgtctccggcgtgcccgcagaggtgctgtgcaacatcgaggccgacacctactggtgcatgagcaagctgctggatggcattcaggacaactacacctttgcccaacctgggattcaaatgaaagtgaaaatgttagaagaactcgtgagccggattgatgagcaagtgcaccggcacctggaccaacacgaagtgagatacctgcagtttgccttccgctggatgaacaacctgctgatgagggaggtgcccctgcgttgtaccatccgcctgtgggacacctaccagtctgaaccggacggcttttctcatttccacttgtacgtgtgcgctgcttttctcgtgagatggaggaaggaaatactagaagaaaaagattttcaagagctgctgctcttcctccagaacctgcccacagcccactgggatgatgaggacatcagcctgttgctggccgaggcctaccgcctcaagtttgcttttgccgacgcccccaatcactacaagaaatgagcccaggcccacccgcagctggcctcactgtcccgggtggcgcgccccacctgcctggctggtggtaggcccctgtgagctggtcccgggctgctaaaaggccttgtgaggtggccccaccctccaggggagctggtgaagatgggccacagacctggtctagggctgacaaagacagggacagcctttgttttctgagataccaaagagagccaggggagggccccgggttcggcggccagaggcaggtcaggggtcccctctccctctccctgcaatgtccttgccaaatgactgcctcgtgctgcccctagtccggggcagcctaggaggccgaccctctttggagtcctgctgtctgggtgccagggccggaacgaggtagtggccatctcatacctactctgaaatgcaaaacttctattctgttgagtgaaagaataaaatgtagacaaaatctagaccgagacgttgcgctgacccggggtctctgtgccgcgaggtcccctcacagctgtatttcactgctgctggccctttccctccgtgtgttttcctgcttgcttggtttaaacgtggctgggaagctgaaggctggagtccaagccgtgagcccgccgagtgcctgggaggccgtgggaccaaaggctgggagcagagggaggcctcgccatcgccttactttccaccttgaacctcttttacaagagagaaacccccacctccctgaggtccagggccaagtggccccgccacgcaggtaggcgccggcctcagccagagcccctggaggcccacccaggctgtcgggccatgttgggctggcagacgggcagggggtcgcgtccctgtcatcaaagccctgaaccacagtgctcttctcaccgcagcctggaagcggaatgagcttttggagacttcctgggacttgctgtccttgtccaggtctgccaggtgtaggggaggtgtgactggttccatcatggaccggttcctccatggaccggttcctccgtggaccggttccgccatggaccggttccgccatggaccactcctgccctggaccactcctgccctggaccggttctgccgtggactggttcccgccgtggaccagttcccgctgtatactggttctgccctggactggttcccgctgtggactggttccttggggctctaagtgcggaagggcccagagctggtccctgcccagcgccctgctagggctgtgtccttggctccaggggccttgggactggcttcccagcgttccctcggtgtgtcacaggctgcatgacccctggaatgcgggcagggccacagccacagtctgtctgatccctgagcccaggacaggctcacgtcctcagcgacccactggtgactgacttcccagactctcctctgtccctcaggagcagccgtgtcctctcccaggccctaggacactgccagagactgtgggacatacaggcataagtgatgtgtgtgtttctgcttctgttttaaaaatccagggtcattacacacagcatggaaattagcacaaaatgctgtgcaaacgtcagatgctcccaaaccagcaaagggatgggcttgcttcacatcagatgcgggcacgccttacccctgccttccgtgtccccaccccagggtcaagggttcctcagaccagccatgcctcctcctcctgccgcctccttttctagatggggaggggattccgtcacaagaagagccgcccctcggccgtgtgcaggaagccccatgtcgctttgccgagatcagccctgggaggatccccttctccagctcagatcatgccgtgtggccagaaggctgcggacacaactgacctgcttctcgaggtggttgatgttttaaacaggaagctccacggagttcagccctgtgtgcatttcctcatgtatgtaaacgccaagactgaatgtgagaggtgttggccgcgggccttaagtctgagcagatccatctggaatgttcggggtgtgctgtctggatgtggtgcgctaaaaacacggaataaagatcagtgac

SEQ ID NO: 6107 - protein, 517 aa, Homo sapiens
MASDGARKQFWKRSNSKLPGSIQHVYGAQHPPFDPLLHGTLLRSTAKMPTTPVKAKRVSTFQEFESNTSDAWDAGEDDDELLAMAAESLNSEVVMETANRVLRNHSQRQGRPTLQEGPGLQQKPRPEAEPPSPPSGDLRLVKSVSESHTSCPAESASDAAPLQRSQSLPHSATVTLGGTSDPSTLSSSALSEREASRLDKFKQLLAGPNTDLEELRRLSWSGIPKPVRPMTWKLLSGYLPANVDRRPATLQRKQKEYFAFIEHYYDSRNDEVHQDTYRQIHIDIPRMSPEALILQPKVTEIFERILFIWAIRHPASGYVQGINDLVTPFFVVFICEYIEAEEVDTVDVSGVPAEVLCNIEADTYWCMSKLLDGIQDNYTFAQPGIQMKVKMLEELVSRIDEQVHRHLDQHEVRYLQFAFRWMNNLLMREVPLRCTIRLWDTYQSEPDGFSHFHLYVCAAFLVRWRKEILEEKDFQELLLFLQNLPTAHWDDEDISLLLAEAYRLKFAFADAPNHYKK

SEQ ID NO: 6108 - DNA, 5250 bp, Homo sapiens
gtccggcggcgtcgcgggcggcgggcggcggggccgcgggaggggcgcgggggcagacaaagccgcggtaatgaatggagcgtccgcccgcgccgccgtcgtccgcagccggccgggagccgccccagaggccgggccgaggtaatgcacaagggtcacgtgtatgctctcaagatgatcaggcagatcctgtcctcaggaccagaagcacgtctctgctgcacacattgttgtctacaccatgagtgtttagtagcaggactcttggaaagcagtgatctatgctgtaagaccatgagtcacagattctttttttcagtactatttatgattagccatatttctagaaacatcctgaaagatggaattatgacgaaaaagtgaagataatctacattcgggggcacaaatgagcacttggatcagtgttttatgaacctaagatacagccggagtagttatggtcagtcatggagaataacttgaaaacttgtcccaaagaggacggtgatttcgtttctgataaaataaagtttaaaatagaagaggaagatgatgatggaattcctcctgatagtttggaaagaatggactttaaaagcgagcaggaggacatgaagcagacagacagcggtggggagcgagcgggcctcggtgggacgggttgcagctgcaagcccccggggaagtacttgtctgcagagagtgaggatgactatggcgcgctgttctcccagtacagcagcaccctatacgacgtggccatggaggccgtgacccagagcctcctttccagccggaacatgagctccaggaagaagtctccagcctggaagcatttttttatctctccccgagacagcactaaagcaatatgcatgtactgtgtgaaggagttcagcagaggcaaaaacgagaaagacttgagtaccagttgtctcatgaggcacgtgaggcgcgcacacccgaccgtgctcattcaggaaaatggcagtgtgtctgccgtgtcctcgttcccctctccctcactcctgcttccaccacagcctgcggacgcgggtgacctcagcaccatcctctcacccatcaaacttgtccagaaagtggcgtctaagatcccgtcccccgatcgaataacagaggagtctgtgtctgtagtttcttctgaagaaatctcctctgacatgtccgtttcggagaagtgcggcagagaagaagccctggtggggtcgtctccccacctccctgctctccattacgatgaacctgcagagaacttagcggagaagagccttccacttccaaagagcacctctgggtccaggagaaggtccgctgtctggaagcacttctacctgtcgccactggacaactccaaagctgtctgcattcactgcatgaacgagttcagccgggggaagaatgggaaggacctgggcacgagctgcctcatcaggcacatgtggagggcacaccgcgccatcgtgttgcaggagaacgggggcacgggcatcccgccactgtactccacccctcccactctgctgccttccttgctgccgccggagggggagctcagctctgtgtcctcgtctccagtaaagccggtcagagagtccccttcggcctcctcctcccctgacaggctgactgaggacttgcagtctcacttgaaccctggagatgggctgatggaagacgtggcggccttctcatcttccgatgacataggggaggcctcggcgtcctctcctgagaagcagcaggctgatgggctgagtcctagattgtttgaatctggcgccatcttccagcagaataaaaaggtcatgaaaagactgaagtcggaggtctggcatcacttctccctggcccccatggacagcctcaaggccgagtgtcggtactgcggctgtgccatcagccgggggaagaagggtgatgtgggcaccagctgcctgatgagacatctctaccggcgccatccagaagttgtcgggagccagaagggcttcctgggtgcaagtctggcaaactctccgtatgccactttggcctctgcagaaagttcctcttccaaattgactgacttgccaacagtggtcacaaaaaacaatcaagttatgtttcctgttaatagcaaaaagacctcgaagctgtggaatcatttttctatttgctccgcagactccacaaaagtcgtgtgcttgcactgtggccggaccatcagccgggggaagaagccgactaacttgggtaccagctgtcttctgagacatttacagcggttccatagcaacgtgctgaaaactgaggtctcggagacggctcggccctcctctccggacacccgggtgccgcggggcacagaattatcaggcgcttcctcttttgatgacaccaatgagaagttttacgattctcacccagttgccaaaaaaatcacaagtctcatagctgaaatgattgcacttgacctccagccatattcttttgtagacaacgttggctttaacaggctgcttgaatacttgaaacctcagtactccctccccgccccttcctacttctccaggacagctatcccaggtatgtatgataatgtgaagcagataattatgtcccaccttaaggaagctgagagtggtgtgatccacttcacgtctggaatatggatgagtaaccagacccgtgagtacctgaccctcacggcccactgggtttccttcgagtcgccagcccggccgcgctgtgacgaccaccactgctcggcgctgttggacgtgtcgcaggtggactgcgactacagtggcaacagcattcagaagcagctggagtgctggtgggaagcgtgggtgacctccaccggccttcaggtgggcatcaccgtcaccgacaacgccagcatcgggaagacgctgaacgagggggagcactcgagcgtgcagtgcttcagccatacggtgaacctgatcgtcagcgaggccattaagagccagcggatggtgcagaacctgctgagcctcgcccggaagatctgcgagcgggtgcaccggtcgcccaaggcgaaggagaaactggccgagctgcagagggagtacgcgctgcctcagcatcacctcatccaggacgtcccgtccaagtggagcacttccttccacatgctcgagcggctcattgagcagaaaagggccattaacgagatgtccgtcgagtgtaacttccgagagctgatcagctgcgaccagtgggaggtcatgcagtccgtgtgccgtgcgctaaagcccttcgaggctgcgagccgggagatgagcacgcagatgtccaccctcagccaggtcatccccatggtacacatcctcaacaggaaggtggagatgctcttcgaggagacgatgggcatcgacaccatgctgcgctctctgaaggaggccatggtgagccgcctgtctgccaccctccacgacccgcggtacgtcttcgccacgctgctggatcctcgctacaaggcctccctgtttacggaggaggaggcggagcagtacaaacaggatttaatcagggaactcgaactcatgaattctacctcagaggacgtggctgcctcccacaggtgtgatgctggctccccgtcgaaagactctgccgcagaggagaacctgtggtcacttgtggccaaggtgaagaagaaagacccaagagaaaagctgcctgaagccatggtgcttgcgtatctggaggaggaggtgcttgaacacagctgtgacccgctcacctactggaacctgaagaaggcgtcctggccggggctgtccgcgctggccgtcagatttttgggctgccccccaagcatcgtcccttcagaaaagctgttcaacacacccactgagaacggtagccttggccaatccaggctcatgatggaacattttgaaaaacttatctttttgaaagtgaatcttcccttaatatactttcagtattgaaactcacgacggcaccactaggccagaggcgtggctgccccagcgttagcagcctgtaccaggtctatgacccgctctgcccacggctgtgtacgacatcagaccaggcactctcagggccgctctccagctcaccacagtgtctccacgtgccttaccccttctccttcaggccaagtttcgcggggtgttttattaagacgtccactagaaatagcttgtcctgtcaactatgaaatatggtgactagattttaattcataaccgtaaagttttttaaagttttgggttagtaatttgttttactagaatgacaaagaagatgtaaaccattttattctgtaggctttttactcaattatgtacaaaccacaaatcaggtactgtattttagtgaagcattgctttaattgcaacagaatagcttttgtggctatcaaatgaaatctgtaaataggaggtggagggcaagccatcctgactgagcagtttttaaccgcaggttctaaagtgtcccgcggagtacagataatattctggaaggtaactgtttactacgacagagacgtggcatttggaaacgaaacttagatgtttcatggagcttattttgagaactttcccatttcaggtttctgcattcaggctttacatggtcagttaactcagagataccccagctgtttatcatcagctcctctgaaatgtgatccctttgtaactgtgctcatcacttcgccagtgcgttcaatgacacgctgatggcaggtggtccctgctgaaacccccacgcctccgcttcagcatctccacgctctgaagctgtctttcaaaatgtgtgcactgacccccttgtttgatcaaatttgtgtaaaatttttttagaagagatggcttattaacagggaagaagcttgttatattccagttgtaagaatagccttagtgtttagatttttttatgatagggaagatgcggccatcactgggatattttcaaatcccaaggacatcagagtgaagtgtcagttgtcagatgattttaaaagttatgtcttcagagaaaaaaagattcattttctcattttaaaccaattaaatattctgagtgagactaatcactcatttgcctacgaccttttagaaaagttgttttgttgaaatactgtacgtacgcttaatctaaatttgcattgactatgttttagtgtatttataaatggtgaactcagtttctgaaattaaacttcttatttgcaatttt

SEQ ID NO: 6109 - DNA, 1678 bp, Homo sapiens
ccatgttggccaggctggtctgagagagaactcctgacctcgtgatccgcctgcctcagcctcccaaagtgctgggatgacaggcgtgcgccactgcacccggcccgtgaaggtcttttctgaagggagctacctttgagaagtgcctgttgggacagaactccctgctctggtctgaccctctgcacgctagggtggtcctgcacctgtcggggagggggccaaggacacagcactgggctggggcagggctctgcgctggtgctgcctgccatcccagttctgccattcccccagcgcacccccgcacccgcccctccagctgatgcctgctccctctctctgcagaacgggctcatgtcggggctgatgcagatgctgctgctgaaggtgtctgcacacatcaccgagcagctgggcatggccccaggtggcgagttcagggaggccttcaaggaggtgggcacagggtgaggtagggggtggccacagggatgtggctcacaggggtggtccggggttcccagtgctccccaacacccagcctctgctccaggccagcaaggtgcctttctgcaagttccacctgggtgaccgacccatccccgtcaccttcaagagggccatcgcagcgctctccttctggcagaaggtcaggctggcttggggcctgtgcttcctgtcagaccccatcaggtagggctgcccccgggaccctggccggcctgcagggtggtctgtgggaggctccaggccctcctgtgcaggtccaagcgcagccaatcctcactcaaggccttccctgccctttccttccgccacaaatcccaaacaaacgtgctgtggtccctgcccggtgtccacagtgccagccccacccccccagcccgttgcccatccctgcggggctgcagccatccctctccacagcaaggatgacgtggaacgctgcaagcagaaggacctactggagcagatgatggccgagatgattggcgagttcccagacctgcaccgcaccatcgtctcggagcgcgacgtctacctaacctacatgctgcgccaggccgcgcggcgcctcgagctgcctcgggcctctgacggtgacggccgcccgcaggcgtgggaccccctgtgaggctgaggcccgagcaggtactgaccccttgtccttccccacagccgagcccaggaagtgcgtcccctccgtggtcgtgggcgtcgtgggcatgggccacgtgcctggcatcgagaagaactggagcaccgacctcaacatccaggagatcatgaccgtgcccccgccgtccgtctccggcagagtgtctcggttggccgtgaaggccgccttcttcggcctgctgggctacagcctgtactggatgggccgccgcaccgcgagcctggtcctgtcgctgcccgccgcgcagtactgcctgcagagggtgaccgaggcccggcacaagtaggagactgctccccgcccgctcgggcccctgaggagccagtgcccccgcggcacttctgggtgccaggtgcatcctagcccgcccgaggcccctgccaccccccatgggggtctgggcccggcctcgcctgccctcctgggccagtcacccctcccccagcccacccaaataaaggattatttaactgtctgaaaaaaaaaaaaaaaaaa

SEQ ID NO: 6110 - protein, 161 aa, Homo sapiens
MWLTGVVRGSQCSPTPSLCSRPARCLSASSTWVTDPSPSPSRGPSQRSPSGRRSGWLGACASCQTPSGRAAPGTLAGLQGGLWEAPGPPVQVQAQPILTQGLPCPFLPPQIPNKRAVVPARCPQCQPHPPSPLPIPAGLQPSLSTARMTWNAASRRTYWSR

SEQ ID NO: 6111 - DNA, 1804 bp, Homo sapiens
gctgggcgacggcgccgccatgtacctgggcgaggtgtgcacggcgaccggcgagcgctgggagctgcagctcaagggcgccgggcccacgcccttctccagacaggccgacggtcgcaaggtcctacggtcaagcatccgggagtttctatgcagcgaagccatgttccacctgggagtccccaccacacgggccggcgcctgcgtcacgtccgagtccacggtggtgcgcgacgtgttctatgatggtaatcccaaatatgaacaatgcacggttgtgttgcgtgtagcttccactttcataaggtttggatcctttgagatttttaagtctgcagatgagcacacagggcgtgcaggccccagcgtggggaggaacgacattcgagtgcagctgctcgactatgtcatcagctccttttaccccgagatccaggctgctcatgccagcgacagcgtgcagagaaatgctgccttcttccgggaggtgacgcggcgcacggcgcggatggtggccgagtggcagtgtgtgggcttctgccacggcgtgctcaacaccgacaacatgagcatcctggggctcaccatcgactacgggccctttggcttcctggacaggtacgaccccgaccacgtgtgcaatgcctccgacaacaccggccgctacgcgtacagcaagcagcccgaggtgtgcaggtggaacctgcggaagctggccgaggccctgcagccggaactgcccctggagctgggggaggccatcctggccgaggagtttgacgccgagttccaaaggcactacctgcagaagatgcgcaggaagctgggcctcgtgcaggtggagctggaggaagacggggcgctggtgtccaagctcctggagaccatgcatctgaccggtgccgacttcacaaacaccttctacttgctgagctccttcccagtggagctagagtcgccaggcctggcggaattcctggccaggctgatggagcagtgtgcctccctggaggagctgaggctggccttccggccccagatggatccccggcagctatccatgatgctgatgctggcgcagtcaaacccgcagctgttcgcgcttatgggcacccgggcaggcatcgccagggagctggagcgtgtggagcagcagtctcggctggagcagctgagtgcggcagagctgcagagcaggaaccagggccactgggctgactggctacaggcgtacagagcccggctggacaaggacctggaaggcgctggggacgctgccgcctggcaggctgagcacgtgcgcgtgatgcacgccaacaacccgaagtacgtgctgaggaactacatcgcgcagaatgccatcgaggctgccgagcgcggggacttctcagaggtgcggcgggtgctgaaactactggagaccccttaccactgcgaggcgggggccgccacagacgccgaggccacggaagccgacggggcggacggcaggcagcgctcctacagcagtaagcccccgctctgggcagcagaactgtgcgtgacatgatcttcgtaacggcctcggcacgctccacacccctggagtctcccgaggcccccatgtgctgctgagtggccaagatgatgccaggctgccctatacactgggggattctgccctggcccatgcacacccgtctttccatgatggcagagacatccagtcaggacctgacccgtctctgtctgaggccggctcagcagtgcagcctggtccctgggggctggacccaggctcctaaataaaccagcaactccctcg

SEQ ID NO: 6112 - protein, 509 aa, Homo sapiens
MYLGEVCTATGERWELQLKGAGPTPFSRQADGRKVLRSSIREFLCSEAMFHLGVPTTRAGACVTSESTVVRDVFYDGNPKYEQCTVVLRVASTFIRFGSFEIFKSADEHTGRAGPSVGRNDIRVQLLDYVISSFYPEIQAAHASDSVQRNAAFFREVTRRTARMVAEWQCVGFCHGVLNTDNMSILGLTIDYGPFGFLDRYDPDHVCNASDNTGRYAYSKQPEVCRWNLRKLAEALQPELPLELGEAILAEEFDAEFQRHYLQKMRRKLGLVQVELEEDGALVSKLLETMHLTGADFTNTFYLLSSFPVELESPGLAEFLARLMEQCASLEELRLAFRPQMDPRQLSMMLMLAQSNPQLFALMGTRAGIARELERVEQQSRLEQLSAAELQSRNQGHWADWLQAYRARLDKDLEGAGDAAAWQAEHVRVMHANNPKYVLRNYIAQNAIEAAERGDFSEVRRVLKLLETPYHCEAGAATDAEATEADGADGRQRSYSSKPPLWAAELCVT

SEQ ID NO: 6113 - DNA, 606 bp, Homo sapiens
gattctcccagcaacaagctgctgtacgccaaggagatctccacctacaagaagatggtggaggattactacaaggggatccggcagatggtgcaggtcagcgaccaggacatgaacacacacctggcagagatttcccggcgccccctccctgcggctgcacccacggccgtgcccacagcgccccctccctgcggctgcaccctcggccgtgcccacagcgccccctccctgcggctccatccacggccgtgtccacagcgccccctccctgcggctgcacccacggccgtgcccacagcgccccctccctgcggctccacccacagccctgctcacagcacccgtccctgtgggtccatccacagccgtgcgtcacacagggagacactgagatggttggatgtgcacaactctgcctgcgcgcacacggactccttgaacaccctcgtggcactccaccagctctaccaatacacgcagaagtactatgacgagatcatcaatgccttggaggaggatcctgccgcccagaagatgcagctggccttccgcctgcagcagattgccgctgcactggagaacaagtcagggtgggcttcctag

SEQ ID NO: 6114 - DNA, 2593 bp, Homo sapiens
gccctgctctagcgggccgcgtagcggacatggcgggctcccggctcccgcggcagctcttcctccagggcgtggcggccgtcttcatgtttgctttcgcttccctctacacgcaaatcccaggcctgtatggccccgagggcatcctacctgcaaggaggacgctgcggcctcagggcaaggggcgctggcagcagctgtgggagaccccgacgctgctgtgggaagcgccgagactggggctggacacggcccagggcctggagctgctgagcctgctgggtgcactagtggccctgggagccctgctgctgagcccactgcgccaccctgtcatctacttgctgctttgggccgcctacctgtcagcctgccaggtgggccaggtgttcctttatttccagtgggactccctgctgctagagactggcttcctggccgtgctggtggccccgctgaggccagcctcccaccgcaaggaggccccccagggcaggcaggcaggggccctgccccacgaagacctccccttctggctggtgcgatggctgctgttccgcctcatgttcgcctcaggcgtggtcaagctgaccagccgctgccctgcgtggtgggggctcactgccctcacctaccactacgagacccagtgcctgcccacgcccgccgcctggttcgcacaccacctgccggtctggctgcacaagctcagcgtggtggccaccttcctaattgagatcgctgtgccgcccctgttcttcgcccccattcgacgcctgcgcttggctgctttctactcgcaggtgctgctgcaggtcctgattatcatcaccggcaactacaacttcttcaacctgatgacgctggtgcttaccactgcgctgctggacgaccagcacctggctgctgagcctggccacggcagccgcaagaagacggccacctcctggcccaaggccctgctggccaccctgtcgctgctgctggaactagccgtctacgggcttctggcctatggcactgtgcactactttggcctggaggttgactggcagcagcgcaccatccactccagaaccactttcaccttccaccagttttctcagtggctgaagacactgacgctgcccactgtgtggctgggtgtggcctccctggtctgggagctgctgagtgccctgtggaggtggacccaggtgcggggctggctacggaagctcagtgctgtagtccaactgtcccttgtgggcactgcgaccgtggccttgttcctgattagcctggtgccgtactcctacgtggagcccgggacccacgggcgcctctggaccggggcccaccgcctgtttggtgccgtggagcacctacagctggccaactcctacggcctcttccgccgcatgactgggcttggtggacggcctgaggtggtgctggagggcagttacgacggccaccactggacggagatcgagttcatgtacaagcctgggaacctgagccggccgcccccggttgtggtgccccaccagccacgcctggactggcagatgtggtttgcagccctgggcccacacacgcacagcccgtggttcacaagcctggtcttgcgcctgctgcagggcaaggagccagtgatccgccttgtccagagccaagtggccaggtatcccttccacaagcagccgcccacctacgtccgagcccagcgctacaagtactggttctcccagcctggggagcagggccagtggtggcggcgccagtgggtggaggagttcttcccatccgtgtccctgggggaccccacgctggagacgctgctcaggcagtttggactacaggagaaaagcccacctcgcacccgcagcgccaacagcaccctggcccaggccctccactggactcgctctcagctgtctcccctggaggcccccgccctgctctgggggctcctcatggccgtgggggctgtcagatttgtgcaagccctgctagcaccctgttctctccggtcctccccgctggcaccagtcagcggggagaagcgcaggccagcctcccagaaagactccggagctgcctccgaacaggccaccgcagcccccaacccctgctccagtagttcgaggaccacccggcgaaagaagtagctgtgttctcccagctgcacgtcctgagagggccaggtcgccgggagtgctctggcctccggcaggacaggacccagccactgtgccttagctgaccctgcagggccaggcacaggttggggggctgcccctggggtttgcagggtgctgcattgagggctccaggccccacccccacgccagccatgcccctccccaggactcccactattgcctctgtgattggcccaggaggaaaacacgaccaagctcaagacccttcccctgccctgggctgtgggggtctgagtctagagcccccaaccctaggccccgtgccagaggggaagaggctgactcccaggggaagaggggaagcactgtcatcttccacgtcatcttcacaccagcccatcctgccctttagatctgggcaccaataaaggcgtcttttgtgcttg

SEQ ID NO: 6115 - protein, 707 aa, Homo sapiens
MAGSRLPRQLFLQGVAAVFMFAFASLYTQIPGLYGPEGILPARRTLRPQGKGRWQQLWETPTLLWEAPRLGLDTAQGLELLSLLGALVALGALLLSPLRHPVIYLLLWAAYLSACQVGQVFLYFQWDSLLLETGFLAVLVAPLRPASHRKEAPQGRQAGALPHEDLPFWLVRWLLFRLMFASGVVKLTSRCPAWWGLTALTYHYETQCLPTPAAWFAHHLPVWLHKLSVVATFLIEIAVPPLFFAPIRRLRLAAFYSQVLLQVLIIITGNYNFFNLMTLVLTTALLDDQHLAAEPGHGSRKKTATSWPKALLATLSLLLELAVYGLLAYGTVHYFGLEVDWQQRTIHSRTTFTFHQFSQWLKTLTLPTVWLGVASLVWELLSALWRWTQVRGWLRKLSAVVQLSLVGTATVALFLISLVPYSYVEPGTHGRLWTGAHRLFGAVEHLQLANSYGLFRRMTGLGGRPEVVLEGSYDGHHWTEIEFMYKPGNLSRPPPVVVPHQPRLDWQMWFAALGPHTHSPWFTSLVLRLLQGKEPVIRLVQSQVARYPFHKQPPTYVRAQRYKYWFSQPGEQGQWWRRQWVEEFFPSVSLGDPTLETLLRQFGLQEKSPPRTRSANSTLAQALHWTRSQLSPLEAPALLWGLLMAVGAVRFVQALLAPCSLRSSPLAPVSGEKRRPASQKDSGAASEQATAAPNPCSSSSRTTRRKK

SEQ ID NO: 6116 - DNA, 3317 bp, Homo sapiens
agcaaaatggcgccagaactagtggcgggctgaggacgccgtacccctcggaaggcagccctgcggtccctttgccgcccgttccctcccggacatggaggacgtggaggcgcgcttcgcccacctcttgcagcccatccgcgacctcaccaagaactgggaggtggacgtggcggcccagctgggcgagtatctggaggagctggatcagatctgcatttcttttgacgaaggcaagaccacaatgaacttcattgaggcagcgttgttgatccagggctctgcctgcgtctacagtaagaaggtggaatacctctactcactcgtctaccaggcccttgatttcatctctggaaagaggcgggccaagcagctctcttcggtgcaggaggacagggccaatggggttgccagctccggggtcccccaggaggcagagaatgagttcctgtcgctggatgacttccctgactcccggactaacgtggatctcaagaatgatcagacgcccagtgtgagtcctcatcatccccctcctgcccatggccctggtggcccctgatgaaatggagaagaacaacaatcccctgtacagccgtcagggtgaggtcctggccagccggaaggatttcaggatgaacacgtgcgttccccaccccagaggggccttcatgttggagccagagggcatgtcccccatggaaccagcgggcgtttcccccatgccagggacccagaaggacaccgggaggactgaggagcagccaatggaagtttccgtgtgcaggagccctgtcccagcactcggcttctcccaggagccaggcccctctccagaaggcccgatgcccctgggtgggggcgaggacgaggatgcagaggaggcagtagagcttcctgaggcctcggcccccaaggccgctctggagcccaaggagtccaggagcccgcagcagagtgctgccctgcccaggaggtacatgctgcgggagcgggagggggccccagagcctgcatcctgcgtgaaggagactccagacccctggcagagcctggacccctttgactccttggagtctaagcccttcaagaaaggtaggccttactctgtgcccccctgtgtggaggaggctctgggacagaagcgcaagaggaagggcgctgccaagctgcaggacttccaccagtggtacctggctgcctatgcagaccatgccgacagcaggcggcttcggcgaaagggtccgtcctttgcagacatggaggtcctgtactggacacacgtgaaggagcagttggaaactctccggaagctgcagaggagggaggtggctgagcagtggctgcggcctgcagaggaggaccacctggaggattccctggaagacctgggggcagcagatgactttctagagcctgaggagtacatggagcccgagggagcagaccccagggaagccgctgaccttgacgcagtgccgatgtccctgagctacgaggagctggttcgaaggaatgtggagctcttcatcgccacctcccagaagtttgtccaggagacagagctgagccagcgcatcagggactgggaggacacagtgcagcctctgctccaggagcaggagcagcatgtgccctttgacatccacacctatggggaccagctggtctcacggttcccccagctcaatgagtggtgtccctttgcggagctggtggctggccagccggccttcgaggtgtgtcgttccatgctggcctccctgcagctggccaatgactacacagtggagataacccagcagcccgggctggagatggccgtggacaccatgtccctgagactgctcacgcaccagcgagcgcacaagcgcttccagacctacgctgccccctccatggcccagccctgagtggggagcaccgaggcaggggtgggggaatgtgtactgaggagccgtgtgtctgctcctggctggcccggcctaataaagcagtgttgccatctcatcttccccctaaaaacccttttatgtacacctgcgcagagaagagggctgcctggcctccctgggccgctggtacagatcacacacacacacagattaaacgcagcccgtttaatgatggggcccagactgcagtggctcaagacaggacactgcggaaagccgccatgtgccgccgcacactgtctgagatctgctcagccgatctgctccggccgtagtaatccgtgaagaggccgtcagggttgagcaggtagatggcaatggagtggtccacgatgtagtcctggtcctcatccttggggcctgcattgtagtacacgcggtaactgtgactagcctgggcaacctgtttggtggagccggtcagacccaacagtcttgggtggaagtcctggacgtagcgggccatggcttcaacgtcgtcccgctcggggtccacagtgatgaagacaggctgcactggaggcaaaccaggctctgcttccagctgccgcaccacctgcaccagcttctccagctcgtctgggcagatgtcagggcagtgagtgaagccaaagtacatcagcacccactggccccggaagtcagccttgcagcgagcccggcctctgtgatccagcaggtggaagtcgccctggcccacagctgcctggcgcagggcttctgttcgcttttgctgctgcagcctctccttctcagccctcagggccagccaggccccaccgagtccagccccgaacaggcctgtgatcagcagccgggttcgaagcccagggccctggggctggccctgcccacctgtctctgcagggccctgccttgacaaaagccaggacctcagatgcagggcctggcctcccagggtcccagggaggacccgaggcttgagctgagagagcctgtgccaagctgtggggctccgagtcagcagcagcatggatctgatgctcctggaaacaagcacaggcgtcaggagccagaagggaaggcccaggacagtgcctgggctgcccctgcgacttgagaccagccacccatctgaaggacccagcccacgttcaggcttaacaggcatttgcagctgctcacctgagctcagaactccacctccaccaaacatccacacctgggcaaccacacctgtcactcctgtcctctacctgggatcaccagcctgtcaccgcaccctgccctgcacctgcacctcagcaaggtgaacctcttgctgacggaaagcattccaagtgcatgccttgcctgaactaaccacgttatctatttgcaataaacccatttcttaaaagg

SEQ ID NO: 6117 - protein, 456 aa, Homo sapiens
MALVAPDEMEKNNNPLYSRQGEVLASRKDFRMNTCVPHPRGAFMLEPEGMSPMEPAGVSPMPGTQKDTGRTEEQPMEVSVCRSPVPALGFSQEPGPSPEGPMPLGGGEDEDAEEAVELPEASAPKAALEPKESRSPQQSAALPRRYMLREREGAPEPASCVKETPDPWQSLDPFDSLESKPFKKGRPYSVPPCVEEALGQKRKRKGAAKLQDFHQWYLAAYADHADSRRLRRKGPSFADMEVLYWTHVKEQLETLRKLQRREVAEQWLRPAEEDHLEDSLEDLGAADDFLEPEEYMEPEGADPREAADLDAVPMSLSYEELVRRNVELFIATSQKFVQETELSQRIRDWEDTVQPLLQEQEQHVPFDIHTYGDQLVSRFPQLNEWCPFAELVAGQPAFEVCRSMLASLQLANDYTVEITQQPGLEMAVDTMSLRLLTHQRAHKRFQTYAAPSMAQP

SEQ ID NO: 6118 - DNA, 1013 bp, Homo sapiens
gctttccacagcgcgggggaacgggaggccgcaggatggtcaagctgacggcggagctgatcgagcaggcggcgcagtacaccagcgcggtgcgcgaccgggagctggacctccgggggtataaaattcccgtcattgaaaatctaggtgctacgttagaccagtttgatgctattgatttttctgacaatgagatcaggaaactggatggttttcctttgttgagaagactgaaaacgttgttagtgaacaaaacagaatatgccgtataggtgagggacttgatcaggctctgccctgtctgacagaactcattctcaccaataataggctcgtggaactgggtgatctggaccctctggcatctctcaaatcgctgacttacctaagtatcctaagaaatccagtaaccaataagaagcattacagattgtatgtgatttataaagttccgcaaatcagagtactggatttccagaaagtgaaactaaagagcgtcaggaagcagagaaaatgttcaagggcaaacggggtgcacagcttgcaaaggatattgccaggagaagcaaaacttttaatccaggtgctggtttgccaactgacaaaaagaaaggtgggccatctccaggggatgtagaagcaatcaagaatgctatagcaaatgcttcaactctggctgaagtggagaggctgaaggggttgctgcagtctggtcagatccctggcagagaacgcagattggggcccactgatgatggtgaagaagagatggaagaagacacagtcacaaacgggtcctgagcagtgaggcagatgtataataataggccgtcttggaacaagtcttgcttttcaaacatagtataatagccttgtttgtgttagcaaagtggaatctatcagcatggttgaaatgcttaagactgctgctgataattttgtaatataagttttgaaatctaaatgtcaattttctacaaattataaaaataaactccactcactgtgctacc

SEQ ID NO: 6119 - DNA, 1481 bp, Homo sapiens
gtcttagcggctgcgcggtggctgctccgtcctttcggtccaggcggcggcagggctgagccagcgacgccctccattcactctccgcgcccgttctccggctgtcctcccgttccgctgcccgccctgccaccatgacggaacaggccatctccttcgccaaagacttcttggccggaggcatcgccgccgccatctccaagacggccgtggctccgatcgagcgggtcaagctgctgctgcaggtccagcacgccagcaagcagatcgccgccgacaagcagtacaagggcatcgtggactgcattgtccgcatccccaaggagcagggcgtgctgtccttctggaggggcaaccttgccaacgtcattcgctacttccccactcaagccctcaacttcgccttcaaggataagtacaagcagatcttcctggggggcgtggacaagcacacgcagttctggaggtactttgcgggcaacctggcctccggcggtgcggccggcgcgacctccctctgcttcgtgtacccgctggatttcgccagaacccgcctggcagcggacgtgggaaagtcaggcacagagcgcgagttccgaggcctgggagactgcctggtgaagatcaccaagtccgacggcatccggggcctgtaccagggcttcagtgtctccgtgcagggcatcatcatctaccgggcggcctacttcggcgtgtacgatacggccaagggcatgctccccgaccccaagaacacgcacatcgtggtgagctggatgatcgcgcagaccgtgacggccgtggccggcgtggtgtcctaccccttcgacacggtgcggcggcgcatgatgatgcagtccgggcgcaaaggagctgacatcatgtacacgggcaccgtcgactgttggaggaagatcttcagagatgaggggggcaaggccttcttcaagggtgcgtggtccaacgtcctgcggggcatggggggcgccttcgtgctggtcctgtacgacgagctcaagaaggtgatctaagggccgcggcctcctccacacacacacacacaccaggggaaccaagagaaccacgtagaatcctcaaccgtgcggaccatcaaccttcgagaaattccagttgtctttttcccagccgcatcctgcctgtagatggccggggaaggctctagaaaaggggcgcattgcgatccaaccatcggcagccgattccgtgtcttgatcacggggtgggagggaaccgtggcgtccctgcgtggggcccatgggtgagacactccagtactgagacctagagtccagatgcttgtaggagccaagtcgtgttctaagtatttatttaaaacaaaagaatcacgttttcccatttgtacttcagcgctagcccctgttttgcacagccgagtactggcgagtatgttctatgttgggcctcctgctgcaaaacaataaacagaggacgcagaggtc

SEQ ID NO: 6120 - protein, 298 aa, Homo sapiens
MTEQAISFAKDFLAGGIAAAISKTAVAPIERVKLLLQVQHASKQIAADKQYKGIVDCIVRIPKEQGVLSFWRGNLANVIRYFPTQALNFAFKDKYKQIFLGGVDKHTQFWRYFAGNLASGGAAGATSLCFVYPLDFARTRLAADVGKSGTEREFRGLGDCLVKITKSDGIRGLYQGFSVSVQGIIIYRAAYFGVYDTAKGMLPDPKNTHIVVSWMIAQTVTAVAGVVSYPFDTVRRRMMMQSGRKGADIMYTGTVDCWRKIFRDEGGKAFFKGAWSNVLRGMGGAFVLVLYDELKKVI

SEQ ID NO: 6121 - DNA, 963 bp, Homo sapiens
atggttctcttcgccgcctgcgagctgggcgtgtttgaccttctcgccgaggccccagggcccctggacgtggcggcagtggctgcaggtgtgagggccagcgcccatgggacagagctcctgctggacatctgtgtgtccctgaagctgctgaaagtggagacgaggggaggaaaagctttctatcgaaacacagagctgtccagcgactacctgaccacggtcagcccgacgtcacaatgcagcatgctgaagtacatgggcaggaccagctaccggtgctggggccacctggcagacgccgtgagagaaggaaggaaccagtacctggagacgtttggcgttcccgctgaagagctttttacggccatctacaggtccgagggcgagcggctacagttcatgcaagctctgcaggaggtctggagcgtcaacgggagaagcgtgctgaccgcctttgacctgtcagtgttcccacttatgtgtgaccttggtggtggggctggagctctggctaaggaatgcatgtctctgtaccctggatgtaagatcaccgtttttgacatcccagaagtggtgtggacggcaaagcagcacttctcattccaggaggaagaacagattgacttccaggaaggacctgctcaatccataagacgattaatgagtgctaatgatggcaagcgctccagaggctccggaagccacggctggattggagacaagatgggatcctcagaggaccaggcctatcgcctccttaatgactacgccaacggcttcatggtgtcccaggtgaagagatgcagagggtccaagaggatttcacagagttcacagaaaccagctcctcaagagacatcaagtcacccaagaatagacaagcaggatgatgcacgcagatcttccagatgcttccagatcttccagatgctcccagaagagctagagcagaggcaatga

SEQ ID NO: 6122 - DNA, 1126 bp, Homo sapiens
tccaaggttctcttcgccgcctgcgagctgggcgtgtttgaccttctcgccgaggccccagggcccctggacgtggcggcagtggctgcaggtgtgagggccagcgcccatgggacagagctcctgctggacatctgtgtgtccctgaagctgctgaaagtggagacgaggggaggaaaagctttctatcgaaacacagagctgtccagcgactacctgaccacggtcagcccgacgtcacaatgcagcatgctgaagtacatgggcaggaccagctaccggtgctggggccacctggcagacgccgtgagagaaggaaggaaccagtacctggagacgtttggcgttcccgctgaagagctttttacggccatctacaggtccgagggcgagcggctacagttcatgcaagctctgcaggaggtctggagcgtcaacgggagaagcgtgctgaccgcctttgacctgtcagtgttcccacttatgtgtgaccttggtgggacatggataaagctggaaaccatcattctcagcaaactatcgcaaggacagaaaaccaaacaccgcgtgttctcactcataggtggggctggagctctggctaaggaatgcatgtctctgtaccctggatgtaagatcaccgtttttgacatcccagaagtggtgtggacggcaaagcagcacttctcattccaggaggaagaacagattgacttccaggaaggggatttcttcaaagaccctcttccggaagctgatctgtacatcctggccagggtcctccatgactgggcagacggaaagtgctcacacctgctggagaggatctaccacacttgcaagccaggtggtggcattctggtaattgaaagcctcctggatgaagacaggcgaggtcctctgctcacgcagctctactctctgaacatgcttgtgcagacggaagggcaggagaggacccccacccactaccacatgctcctctcttctgctggcttcagagacttccagtttaagaaaacaggagccatttatgatgccattttagccaggaaataactgtttcttgtgacctggaactaacgtcaaagcacacaagacataataataaagacatgtacctcca

SEQ ID NO: 6123 - DNA, 9633 bp, Homo sapiens
atgcccaagcgcgcgcactggggggccctctccgtggtgctgatcctgctttggggccatccgcgagtggcgctggcctgcccgcatccttgtgcctgctacgtccccagcgaggtccactgcacgttccgatccctggcttccgtgcccgctggcattgctaaacacgtggaaagaatcaatttggggtttaatagcatacaggccctgtcagaaacctcatttgcaggactgaccaagttggagctacttatgattcacggcaatgagatcccaagcatccccgatggagctttaagagacctcagctctcttcaggttttcaagttcagctacaacaagctgagagtgatcacaggacagaccctccagggtctctctaacttaatgaggctgcacattgaccacaacaagatcgagtttatccaccctcaagctttcaacggcttaacgtctctgaggctactccatttggaaggaaatctcctccaccagctgcaccccagcaccttctccacgttcacatttttggattatttcagactctccaccataaggcacctctacttagcagagaacatggttagaactcttcctgccagcatgcttcggaacatgccgcttctggagaatctttacttgcagggaaatccgtggacctgcgattgtgagatgagatggtttttggaatgggatgcaaaatccagaggaattctgaagtgtaaaaaggacaaagcttatgaaggcggtcagttgtgtgcaatgtgcttcagtccaaagaagttgtacaaacatgagatacacaagctgaaggacatgacttgtctgaagccttcaatagagtcccctctgagacagaacaggagcaggagtattgaggaggagcaagaacaggaagaggatggtggcagccagctcatcctggagaaattccaactgccccagtggagcatctctttgaatatgaccgacgagcacgggaacatggtgaacttggtctgtgacatcaagaaaccaatggatgtgtacaagattcacttgaaccaaacggatcctccagatattgacataaatgcaacagttgccttggactttgagtgtccaatgacccgagaaaactatgaaaagctatggaaattgatagcatactacagtgaagttcccgtgaagctacacagagagctcatgctcagcaaagaccccagagtcagctaccagtacaggcaggatgctgatgaggaagctctttactacacaggtgtgagagcccagattcttgcagaaccagaatgggtcatgcagccatccatagatatccagctgaaccgacgtcagagtacggccaagaaggtgctactttcctactacacccagtattctcaaacaatatccaccaaagatacaaggcaggctcggggcagaagctgggtaatgattgagcctagtggagctgtgcaaagagatcagactgtcctggaagggggtccatgccagttgagctgcaacgtgaaagcttctgagagtccatctatcttctgggtgcttccagatggctccatcctgaaagcgcccatggatgacccagacagcaagttctccattctcagcagtggctggctgaggatcaagtccatggagccatctgactcaggcttgtaccagtgcattgctcaagtgagggatgaaatggaccgcatggtatatagggtacttgtgcagtctccctccactcagccagccgagaaagacacagtgacaattggcaagaacccaggggagtcggtgacattgccttgcaatgctttagcaatacccgaagcccaccttagctggattcttccaaacagaaggataattaatgatttggctaacacatcacatgtatacatgttgccaaatggaactctttccatcccaaaggtccaagtcagtgacagtggttactacagatgtgtggctgtcaaccagcaaggggcagaccattttacggtgggaatcacagtgaccaagaaagggtctggcttgccatccaaaagaggcagacgcccaggtgcaaaggctctttccagagtcagagaagacatcgtggaggatgaagggggctcgggcatgggagatgaagagaacacttcaaggagacttctgcatccaaaggaccaagaggtgttcctcaaaacaaaggatgatgccatcaatggagacaagaaagccaagaaagggagaagaaagctgaaactctggaagcattcggaaaaagaaccagagaccaatgttgcagaaggtcgcagagtgtttgaatctagacgaaggataaacatggcaaacaaacagattaatccggagcgctgggctgatattttagccaaagtccgtgggaaaaatctccctaagggcacagaagtacccccattgattaaaaccacaagtcctccatccttgagtctagaagtcacaccaccttttcctgctatttctcccccctcagcatctcctgtgcagacagtaaccagtgctgaagaatcctcagcagatgtacctctacttggtgaagaagagcacgttttgggtaccatttcctcagccagcatggggctagaacacaaccacaatggagttattcttgttgaacctgaagtaacaagcacacctctggaggaagttgttgatgacctttccgagaagactgaggagataacttccactgaaggagacctgaaggggacagcagcccctacacttatatctgagccttatgaaccatctcctactctgcacacattagacacagtctatgaaaagcccacccatgaagagacggcaacagagggttggtctgcagcagatgttggatcgtcaccagagcccacatccagtgagtatgagcctccattggatgctgtctccttggctgagtctgagcccatgcaatactttgacccagatttggagactaagtcacaaccagatgaggataagatgaaagaagacacctttgcacaccttactccaacccccaccatctgggttaatgactccagtacatcacagttatttgaggattctactataggggaaccaggtgtcccaggccaatcacatctacaaggactgacagacaacatccaccttgtgaaaagtagtctaagcactcaagacaccttactgattaaaaagggtatgaaagagatgtctcagacactacagggaggaaatatgctagagggagaccccacacactccagaagttctgagagtgagggccaagagagcaaatccatcactttgcctgactccacactgggtataatgagcagtatgtctccagttaagaagcctgcggaaaccacagttggtaccctcctagacaaagacaccacaacagcaacaacaacaccaaggcaaaaagttgctccgtcatccaccatgagcactcacccttctcgaaggagacccaacgggagaaggagattacgccccaacaaattccgccaccggcacaagcaaaccccacccacaacttttgccccatcagagactttttctactcaaccaactcaagcacctgacattaagatttcaagtcaagtggagagttctctggttcctacagcttgggtggataacacagttaatacccccaaacagttggaaatggagaagaatgcagaacccacatccaagggaacaccacggagaaaacacgggaagaggccaaacaaacatcgatataccccttctacagtgagctcaagagcgtccggatccaagcccagcccttctccagaaaataaacatagaaacattgttactcccagttcagaaactatacttttgcctagaactgtttctctgaaaactgagggcccttatgattccttagattacatgacaaccaccagaaaaatatattcatcttaccctaaagtccaagagacacttccagtcacatataaacccacatcagatggaaaagaaattaaggatgatgttgccacaaatgttgacaaacataaaagtgacattttagtcactggtgaatcaattactaatgccataccaacttctcgctccttggtctccactatgggagaatttaaggaagaatcctctcctgtaggctttccaggaactccaacctggaatccctcaaggacggcccagcctgggaggctacagacaggcatacctgttaccacttctggggaaaatcttacagaccctccccttcttaaagagcttgaggatgtggatttcacttccgagtttttgtcctctttgacagtctccacaccatttcaccaggaagaagctggttcttccacaactctctcaagcataaaagtggaggtggcttcaagtcaggcagaaaccaccacccttgatcaagatcatcttgaaaccactgtggctattctcctttctgaaactagaccacagaatcacacccctactgctgcccggatgaaggagccagcatcctcgtccccatccacaattctcatgtctttgggacaaaccaccaccactaagccagcacttcccagtccaagaatatctcaagcatctagagattccaaggaaaatgttttcttgaattatgtggggaatccagaaacagaagcaaccccagtgaacaatgaaggaacacagcatatgtcagggccaaatgaattatcaacaccctcttccgaccaggatgcatttaacttgtctacaaagctggaattggaaaagcaagtatttggtagtaggagtctaccacgtggcccagatagccaacgccaggatggaagagttcatgcttctcatcaactaaccagagtccctgccaaacccatcctaccaacagcaacagtgaggctgcctgaaatgtccacacaaagcgcttccagatactttgtaacttcccagtcacctcgtcactggaccaacaaaccggaaataactacatatccttctggggctttgccagagaacaaacagtttacaactccaagattatcaagtacaacaattcctctcccattgcacatgtccaaacccagcattcctagtaagtttactgaccgaagaactgaccaattcaatggctactccaaagtgtttggaaataacaacatccctgaggcaagaaacccagttggaaagcctcccagtccaagaattcctcattattccaatggaagactccctttctttaccaacaagactctttcttttccacagttgggagtcacccggagaccccagatacccacttctcctgccccagtaatgagagagagaaaagttattccaggttcctacaacaggatacattcccatagcaccttccatctggactttggccctccggcacctccgttgttgcacactccgcagaccacgggatcaccctcaactaacttacagaatatccctatggtctcttccacccagagttctatctcctttataacatcttctgtccagtcctcaggaagcttccaccagagcagctcaaagttctttgcaggaggacctcctgcatccaaattctggtctcttggggaaaagccacaaatcctcaccaagtccccacagactgtgtccgtcaccgctgagacagacactgtgttcccctgtgaggcaacaggaaaaccaaagcctttcgttacttggacaaaggtttccacaggagctcttatgactccgaataccaggatacaacggtttgaggttctcaagaacggtaccttagtgatacggaaggttcaagtacaagatcgaggccagtatatgtgcaccgccagcaacctgcacggcctggacaggatggtggtcttgctttcggtcaccgtgcagcaacctcaaatcctagcctcccactaccaggacgtcactgtctacctgggagacaccattgcaatggagtgtctggccaaagggaccccagccccccaaatttcctggatcttccctgacaggagggtgtggcaaactgtgtcccccgtggagggccgcatcaccctgcacgaaaaccggaccctttccatcaaggaggcgtccttctcagacagaggcgtctataagtgcgtggccagcaatgcagccggggcggacagcctggccatccgcctgcacgtggcggcactgccccccgttatccaccaggagaagctggagaacatctcgctgcccccggggctcagcattcacattcactgcactgccaaggctgcgcccctgcccagcgtgcgctgggtgctcggggacggtacccagatccgcccctcgcagttcctccacgggaacttgtttgttttccccaacgggacgctctacatccgcaacctcgcgcccaaggacagcgggcgctatgagtgcgtggccgccaacctggtaggctccgcgcgcaggacggtgcagctgaacgtgcagcgtgcagcagccaacgcgcgcatcacgggcacctccccgcggaggacggacgtcaggtacggaggaaccctcaagctggactgcagcgcctcgggggacccctggccgcgcatcctctggaggctgccgtccaagaggatgatcgacgcgctcttcagttttgatagcagaatcaaggtgtttgccaatgggaccctggtggtgaaatcagtgacggacaaagatgccggagattacctgtgcgtagctcgaaataaggttggtgatgactacgtggtgctcaaagtggatgtggtgatgaaaccggccaagattgaacacaaggaggagaacgaccacaaagtcttctacgggggtgacctgaaagtggactgtgtggccaccgggcttcccaatcccgagatctcctggagcctcccagacgggagtctggtgaactccttcatgcagtcggatgacagcggtggacgcaccaagcgctatgtcgtcttcaacaatgggacactctactttaacgaagtggggatgagggaggaaggagactacacctgctttgctgaaaatcaggtcgggaaggacgagatgagagtcagagtcaaggtggtgacagcgcccgccaccatccggaacaagacttacttggcggttcaggtgccctatggagacgtggtcactgtagcctgtgaggccaaaggagaacccatgcccaaggtgacttggttgtccccaaccaacaaggtgatccccacctcctctgagaagtatcagatataccaagatggcactctccttattcagaaagcccagcgttctgacagcggcaactacacctgcttggtcaggaacagcgcgggagaggataggaagacggtgtggattcacgtcaacgtccagccacccaagatcaacggtaaccccaaccccatcaccactgtgcgggagatagcagccgggggcagtcggaaactgattgactgcaaagctgaaggcatccccaccccgagggtgttatgggcttttcccgagggtgtggttctgccagctccatactatggaaaccggatcactgtccatggcaacggttccctggacatcaggagtttgaggaagagcgactccgtccagctggtatgcatggcacgcaacgagggaggggaggccaggttgatcctgcagctcactgtcctggagcccatggagaaacccatcttccacgacccgatcagcgagaagatcacggccatggcgggccacaccatcagcctcaactgctctgccgcggggaccccgacacccagcctggtgtgggtccttcccaatggcaccgatctgcagagtggacagcagctgcagcgcttctaccacaaggctgacggcatgctacacattagcggtctctcctcggtggacgccggggcctaccgctgcgtggcccgcaatgccgctggccacacggagaggctggtctccctgaaggtgggactgaagccagaagcaaacaagcagtatcataacctggtcagcatcatcaatggtgagaccctgaagctcccctgcacccctcccggggctgggcagggacgtttctcctggacgctccccaatggcatgcatctggagggcccccaaaccctgggacgcgtttctcttctggacaatggcaccctcacggttcgtgaggcctcggtgtttgacaggggtacctatgtatgcaggatggagacggagtacggcccttcggtcaccagcatccccgtgattgtgatcgcctatcctccccggatcaccagcgagcccaccccggtcatctacacccggcccgggaacaccgtgaaactgaactgcatggctatggggattcccaaagctgacatcacgtgggagttaccggataagtcgcatctgaaggcaggggttcaggctcgtctgtatggaaacagatttcttcacccccagggatcactgaccatccagcatgccacacagagagatgccggcttctacaagtgcatggcaaaaaacattctcggcagtgactccaaaacaacttacatccacgtcttctgaaatgtggattccagaatgattgcttaggaactgacaacaaagcggggtttgtaagggaagccaggttggggaataggagctcttaaataatgtgtcacagtgcatggtggcctctggtgggtttcaagttgaggttgatcttgatctacaattgttgggaaaaggaagcaatgcagacacgagaaggagggctcagccttgctgagacactttcttttgtgtttacatcatgccaggggcttcattcagggtgtctgtgctctgactgcaatttttctttttttgcaaatgccactcgactgccttcataagcgtccataggatatctgaggaacattcatcaaaaataagccatagacatgaacaacacctcactaccccattgaagacgcatcacctagttaacctgctgcagtttttacatgatagactttgttccagattgacaagtcatctttcagttatttcctctgtcacttcaaaactccagcttgcccaataaggatttagaaccagagtgactgatatatatatatattttaattcagagttacatacatacagctaccattttatatgaaaaaagaaaaacatttcttcctggaactcactttttatataatgttttatatatatattttttcctttcaaatcagacgatgagactagaaggagaaatactttctgtcttattaaaattaataaattattggtctttacaagacttggatacattacagcagacatggaaatataattttaaaaaatttctctccaacctccttcaaattcagtcaccactgttatattaccttctccaggaaccctccagtggggaaggctgcgatattagatttccttgtatgcaaagtttttgttgaaagctgtgctcagaggaggtgagaggagaggaaggagaaaactgcatcataactttacagaattgaatctagagtcttccccgaaaagcccagaaacttctctgcagtatctggcttgtccatctggtctaaggtggctgcttcttccccagccatgagtcagtttgtgcccatgaataatacacgacctgttatttccatgactgctttactgtatttttaaggtcaatatactgtacatttgataataaaataatattctccc

SEQ ID NO: 6124 - DNA, 1264 bp, Homo sapiens
ggcacgaggggaggccggggcggggcgggcgcagccggcgctgagcttgcagggccgctcccctcacccgcccccttcgagtccccgggcttcgccccacccggcccgtgggggagtatctgtcctgccgccttcgcccacgccctgcactccgggaccgtccctgcgcgctctgggcgcaccatggcccgcggggctgcgctggcgctgctgctcttcggcctgctgggtgttctggtcgccgccccggatggtggtttcgatttatccgatgcccttcctgacaatgaaaacaagaaacccactgcaatccccaagaaacccagtgctggggatgactttgacttaggagatgctgttgttgatggagaaaatgacgacccacgaccaccgaacccacccaaaccgatgccaaatccaaaccccaaccaccctagttcctccggtagcttttcagatgctgaccttgcggatggcgtttcaggtggagaaggaaaaggaggcagtgatggtggaggcagccacaggaaagaaggggaagaggccgacgccccaggcgtgatccccgggattgtgggggctgtcgtggtcgccgtggctggagccatctctagcttcattgcttaccagaaaaagaagctatgcttcaaagaaaatgcagaacaaggggaggtggacatggagagccaccggaatgccaacgcagagccagctgttcagcgtactcttttagagaaatagaagattgtcggcagaaacagcccaggcgttggcagcagggttagaacagctgcctgaggctcctccctgaaggacacctgcctgagagcagagatggaggccttctgttcacggcggattctttgttttaatcttgcgatgtgctttgcttgttgctgggcggatgatgtttactaacgatgaattttacatccaaagggggataggcacttggacccccattctccaaggcccgggggggcggtttcccatgggatgtgaaaggctggccattattaagtccctgtaactcaaatgtcaaccccaccgaggcacccccccgtcccccagaatcttggctgtttacaaatcacgtgtccatcgagcacgtctgaaacccctggtagccccgacttctttttaattaaaataaggtaagcccttcaatttgtttcttcaatatttctttcatttgtagggatatttgtttttcatatcagactaataaaaagaaattagaaaccaaaaaaaaaaaaaaaaaaaa

SEQ ID NO: 6125 - protein, 185 aa, Homo sapiens
MARGAALALLLFGLLGVLVAAPDGGFDLSDALPDNENKKPTAIPKKPSAGDDFDLGDAVVDGENDDPRPPNPPKPMPNPNPNHPSSSGSFSDADLADGVSGGEGKGGSDGGGSHRKEGEEADAPGVIPGIVGAVVVAVAGAISSFIAYQKKKLCFKENAEQGEVDMESHRNANAEPAVQRTLLEK

SEQ ID NO: 6126 - DNA, 1086 bp, Homo sapiens
cggggcggcggcggcggcgtgaagtcactgctgctctgggttcgggttggcgactgaaggcggtaccggcctcccggaacagcccgggggagggcttaggtgcagaagggcaggctggccgcggccggtttggtctggggaccacgggctggagcaggtggaaatttaaaattgtttacagtcaacactgtttccagccatgggtttgtctccatctgctcctgctgttgcagttcaggcctcaaatgcttcagcgtccccaccttcaggatgcccgatgcatgaagggaaaatgaaaggctgtccagtgaatacagagccatctggcccaacctgtgagaagaaaacatactctgtgcctgcccaccaggaacgcgcctatgagtacgtggagtgtcccattaggggcactgcggctgagaataaggagaacctagatccttcaaatctgatgccaccaccaaatcaaacaccagctccagatcagccatttgcattgtctactgtcagagaagagtcatccattccgagagcagattcagagaaaaagtgggtttacccttctgagcagatgttctggaatgcaatgttaaagaaagggtggaagtggaaggatgaggatatcagtcagaaggatatgtataatatcattagaattcacaatcagaataacgagcaggcttggaaggagattttgaagtgggaagcccttcatgctgcagagtgtccttgtggtccatcattgatccggtttggagggaaagcaaaagagtattcaccaagggcacgaattcgttcctggatggggtatgagttgccttttgataggcacgattggatcataaaccgttgcgggacagaagttagatatgtgattgattattatgatggtggtgaagtcaacaaggactaccagttcaccatcctggacgtccgtcctgccttagattcactttcggcagtatgggacagaatgaaagtcgcttggtggcgttggacctcgtaaagcactgtttcagatggaaaaatataaactatttttttctgagcgatacattaaactattttccccagaaaaaaaaaaaa

SEQ ID NO: 6127 - protein, 268 aa, Homo sapiens
MGLSPSAPAVAVQASNASASPPSGCPMHEGKMKGCPVNTEPSGPTCEKKTYSVPAHQERAYEYVECPIRGTAAENKENLDPSNLMPPPNQTPAPDQPFALSTVREESSIPRADSEKKWVYPSEQMFWNAMLKKGWKWKDEDISQKDMYNIIRIHNQNNEQAWKEILKWEALHAAECPCGPSLIRFGGKAKEYSPRARIRSWMGYELPFDRHDWIINRCGTEVRYVIDYYDGGEVNKDYQFTILDVRPALDSLSAVWDRMKVAWWRWTS

SEQ ID NO: 6128 - DNA, 898 bp, Homo sapiens
gagatctgatggttttataaagaggagttcccctgcacaagctccctctcttgcctgccaccatgtaagaagtccctttggtcttcctttgtcttctgccgtgattgtgaggcctccccagccatgtggaacttataaaataataagatggctgatcctgcaaagaggcgcggtgacatcaacagtgactcagtctctatgatggtattagtaactggcagctgactctcctatttatcatcaagttatgttccaaataagactttcaagtctgagaaaaatgacaaatcccttccaggcatggttcaagttaaagctgaaactgtgtcttcgtttcagctcaagagaggttttgattgtgtcgtggcttttccttgtgtattggttgaggaactgtgccttggaggggcggggagtcttgagaatgggtcaactgatggagggggagtggaagacattggttgcccaagaaaatatgtcaacatctgtccatcactgcaactccggcctgattatcattttttctgcttctgtaagcaccaatgagacaatgccactgaaccacattctttgttgcctgcagtatttcccaccactgcgccacctctgatatgctaatgaggaagcccagggttttgtgtggctgaaaagcctttcaggcacaatcagtgggtcaacaatctcaactctgtacagcggctcagcctgctctgtgagaggctcctctttcggaggggtccttcctcacaccttttctgtgagtgcgtctgtgcttaaggaagggcaattaaccatctggctgcttgtcccctggagaaattgacagaacatcaaacagaataaactcataccttgaaaactgccaagtggcacatgactgtccggttcactgtgggga

SEQ ID NO: 6129 - protein, 120 aa, Homo sapiens
MFQIRLSSLRKMTNPFQAWFKLKLKLCLRFSSREVLIVSWLFLVYWLRNCALEGRGVLRMGQLMEGEWKTLVAQENMSTSVHHCNSGLIIIFSASVSTNETMPLNHILCCLQYFPPLRHL

SEQ ID NO: 6130 - DNA, 2009 bp, Homo sapiens
cggacatctccctgggagtcgcgcagagtggagtcaaaggcaaccagtgctcgctgcggtctctggggatcgggaccgcggcggcggcccgcgagcgggatgttccggggcttgagcagttggttgggcttgcagcagccggtggcaggcggtgggcagcccaatggagatgctccacccgagcagccgtccgagacggtggctgagtctgcggaggaggagctgcagcaagcgggagaccaggagctcctccaccaggccaaagacttcggcaactatttatttaactttgcatctgctgccacaaaaaagataactgaatcagttgctgaaacagcacaaacaataaagaaatccgtagaagaaggaaaaatagatggcatcattgacaagacaattataggagattttcagaaggaacagaaaaaatttgttgaagagcaacatacaaagaagtcagaagcagctgtgcccccatgggttgacactaacgatgaagaaacaattcaacaacaaattttggccttatcagctgacaagaggaatttccttcgtgaccctccggctggcgtgcaatttaatttcgactttgatcagatgtaccccgtggccctggtcatgctccaggaggatgagctgctaagcaagatgagatttgccctcgttcctaaacttgtgaaggaagaagtgttctggaggaactacttttaccgcgtctccctgattaagcagtcagcccagctcacggccctggctgcccaacagcaggccgcagggaaggaggagaagagcaatggcagagagcaagatttgccgctggcagaggcagtacggcccaaaacgccacccgttgtaatcaaatctcagcttaaaactcaagaggatgaggaagaaatttctactagcccaggtgtttctgagtttgtcagtgatgccttcgatgcctgtaacctaaatcaggaagatctaaggaaagaaatggagcaactagtgcttgacaaaaagcaagaggagacagccgtactggaagaggattctgcagattgggaaaaagaactgcagcaggaacttcaagaatatgaagtggtgacagaatctgaaaaacgagatgaaaactgggataaggaaatagagaaaatgcttcaagaggaaaattagctgttcctgaaatagaagaataatccttaacagtctgcaaactgacattaaattctagatgttgacaattactgaatcagaaggcatgaaagagtataattttatgaaattcaaaattattcttttttcaagttgaaacttgcctcttctactttaaaaaagtatatagaacagttacttctaataatcagaaagagatgttttatagaacatttctttaatataaagttagagatgtcttcataggcagtatggctatctttgccacagaaacataagtaaaattttagagttctgttttccatgaggtcaaaaatataatttattcctcagtcatggttttctaaatatctgtactccacattccattttaattgatatgagggtgttaaagtacctacttaatgggttgattactatcaaaatgaccaaattataccaaagaacttaagaggaagcactttcagaactattcacttgccaggtattttctaaaattccacctgaaagccaaaagataaaataaataagttgattttaatgatataagcatcacacaattttacattaagaaatactgtgcaggccatgcgtggtggctcaggcctgtaatcccagcactttgggaggccgaggtgggcagatcaccggaggtcaggagttcgagaccagccttgccaacatagtgaaaccctgtctctactaaaaatacaaaaattagccgggcatggtggcaggcacctgtaatcccagctactagggaggcttttgaacccaggaggcagaggttgcagcgagctgagatcgcgccactgcactccagcctgggtgatagagtgagattcagtctc

SEQ ID NO: 6131 - DNA, 609 bp, Homo sapiens
atggagaaaaaacaaaacaagaagaaagtggaggaggtgctagaagaggaggaacaggaatatgtggtggaaaaagttctctaccgtcgattgccccgccccccatatcccctccttctgccaactttatcacttaagacagactgcctgggtcaccctgtttatgacaatagaagaataaggaaagaacactcttcccctgctcaaatcctccaatgtacctgccgtacccacggccatgacagacggcactgctcgttcccatgctctgctgcaaaggtgggcctggcagccttgtgtgggcaccatgacccacctcacacctggcgtcacctgagtgggagaaaggagagccaacccaaggagaagaaagaagggtcggaaaagccccgaggctttgttcaggtttggaagccggaaccagattattggagctacagacctccagtgggagagctcatgttcctgatgaaagggaaaaattttgatgaggctgacctcgtccctgccaaggaagtcaatgtcaaatgcccacgggttgtcatatccttctatgaggaaaggctgacgtggcattcctaccccaaagaggatgatgacaagaattaa

SEQ ID NO: 6132 - DNA, 1642 bp, Homo sapiens
tgtttgaagatactgtggaggagcgtgtcatcaatgaagaatataaaatctggaagaagaatacaccgtttctatatgacctggttatgacccatgctcttcagtggcccagtcttaccgttcagtggcttcctgaagtgactaaacctgaaggaaaagattatgcccttcattggctagtgctggggactcatacgtctgatgagcagaatcatctggtggttgctcgagtacatattcccaatgatgatgcacagtttgatgcttcccattgtgacagtgacaagggtgaatttggtggctttggttctgtaacaggaaaaattgaatgtgaaattaaaatcaatcacgaaggagaagtaaaccgtgctcgttacatgccgcagaatcctcacatcattgctacaaaaacaccatcttctgatgtgttggtttttgactatacaaaacaccctgctaaaccagacccaagtggagaatgtaatcctgatctcagattaagaggtcaccagaaggaaggctatggtctctcctggaattcaaatttgagtggacatctcctaagtgcatctgatgaccatactgtttgtctgtgggatataaacgcaggaccaaaagaaggcaaaattgtggatgctaaagccatctttactggccactcagctgttgtagaggatgtggcctggcacctgctgcacgagtcattgtttggatctgttgctgatgatcagaaacttatgatatgggacaccaggtccaataccacctccaagccgagtcacttggtggatgcgcacactgccgaagtcaactgcctctcattcaatccctacagcgaatttattctagccaccggtctgcggataagaccgtagctttatgggatctgcgtaacttaaaattaaaactccataccttcgaatctcataaagatgaaattttccaggtccactggtctccacataatgaaactattctggcttcaagtggtactgaccgccgcctgaatgtgtgggatttaagtaaaattggggaagaacaatcagcagaagatgcagaagatgggcctccagaactcctgtttattcatggaggacacactgctaagatttcagattttagctggaaccccaatgagccttgggtcatttgctcagtgtctgaggataacatcatgcagatatggcaaatggctgaaaatatttacaatgatgaagagtcagatgtcacgacatccgaactggagggacaaggatcttaaacccaaagtacgagaaatgtttctgttgaatgtaatgctacatgaatgcttgatttatcaagcgccaaaaaggcattgtatagtaggaaatgtaagtggggtggcttatggcttctttatcctctgattctagcactttcaagtgagctgttgcgtactgtatcatattgtagctattagggaagagaagaatgttgcttaagaaagaacatcaccattgattttaaatacaagtagcagggtattgcctttgattcaactgttttaagtcctcattttctcaaactaagtgcttgctgttcccaaatatgcaagaataacttttacactttttccttccaacacttcttgattggctttgcagaaataaagttttaaaat

SEQ ID NO: 6133 - protein, 262 aa, Homo sapiens
MTHALQWPSLTVQWLPEVTKPEGKDYALHWLVLGTHTSDEQNHLVVARVHIPNDDAQFDASHCDSDKGEFGGFGSVTGKIECEIKINHEGEVNRARYMPQNPHIIATKTPSSDVLVFDYTKHPAKPDPSGECNPDLRLRGHQKEGYGLSWNSNLSGHLLSASDDHTVCLWDINAGPKEGKIVDAKAIFTGHSAVVEDVAWHLLHESLFGSVADDQKLMIWDTRSNTTSKPSHLVDAHTAEVNCLSFNPYSEFILATGLRIRP

SEQ ID NO: 6134 - DNA, 2635 bp, Homo sapiens
atcactggtctcgcgtgcgcgtgaccaggcccggtttccggtgccaggacctttccgaagcgtcgagtggcctaacggtcacagctgtcgcccatcggagaggcaggactactgcgagcagttttaccgcgacctccggaggccggcgtgacaggctctgtcactaaaataggaaccgaatattgtatctgacgcatcctgtaatactgaagagcaactgaagacagttgatgatgtccttattcattgccaggttatatatgatgctctgcaaaacctggataagaagattgatgtgattcgtagaaaggtttcaaaaatccaacgtttccatgcgagatccctgtggacaaatcataagcgatatggatataaaaagcattcttaccggcttgttaaaaagcttaaactccagaaaatgaagaaaaatgaggtttacgagacattctcctaccctgaaagttacagccccactttaccagtgtcaaggcgtgagaataattccccgagcaaccttccaaggccatccttttgcatggaagaataccagcgagctgagctggaggaggacccgatcctcagccgcactccgagtccagtgcatccctcagatttctctgagcataattgtcagccgtattatgcatctgatggtgcaacgtatggttcttcttcagggctctgccttggcaaccctcgggctgacagcatccacaacacttactcaactgaccatgcttctgcagcaccaccttcagttacaaggtcaccagttgaaaatgacggttacatagaggaaggaagcatcactaagcacccttcaacctggtcggtggaagcagtggtcctatttctaaaacaaacagatcctcttgcattatgccctcttgtcgacctcttcagaagccatgaaattgacgggaaggctctgctcctactcacgagtgacgtgttgctgaagcacttgggggtgaagctgggaacggctgtgaagctatgctactacattgaccgacttaaacaaggaaaatgctttgaaaattgaaaaaatccttgtgcaaatttagattgggccaacttctagaggcaccaatgccttcttagtgtggaatcatttttctgccctttagtcgtttttgttttgtagaaagtatctctcaaaatatattatagctagaattgtagaactatgttatagtccagtctacttctttaaaaaccatttaaactgctagatagtattagaatagtccaatagaaaattcattctttataggtctttaaaaattacttttattatattgtttacaaatatatttcatgcaagaaacagaaaaaaaaaaaaaccctttgattctggttcatctcgatacagagaaccaaaacagctaagagaggtattatcagggttgacaactcctatgattgaatctatgggaattattcctcagaagagaatttaaaggtgtacccatatatatctctttctggagtattttatctgtctgatgttgcagtattctacaagtttccagaaagagaatagccatataaattattttcctttctgctattatttctctatatgttttatttattcagatttagagtaaaaaataagcatataaacttttattatgtgctcttaacagttttaagataaactataggatagatagaatggttattttatgcaagaaatattgtaccgcaagggtggtttggatgaagtctgactactttttttcaaacaaactattatattaaaactgtcatattttggctaagtttggacctataactacactttcattgtttgcatctctctatgaagatacgtctgtccaaacttttaaaaggcataactgtattttatgtgtttattctttatatagatagtattttatattttattctcacccgaagtattcacacaatctttttaaaaaaaatttgaaatggcattttgtattgccacagaggtaggatgagccatatattagtgaaatgttttattttgtaaaatataaatggattatttgccatcattagtacctctcaacttactttttagaggacaagaaacaatctgtagattggtttccatacagggaagttctccgtcctatgcaatgtttctaattaatttgcttaattctgagccattaatcctgctacactttgaatgatacattaattcagactaatctttgggggctttattttgtaagttagaactttcaagggaaacatgttcaacactattattttgttataaatttataactttgttattacattgtgtaacaaatataaggtttacgagctatgagaattggtgctatcaccattagctatttgctgtaatgtcaagaaaatgttcaccagatgcaagaatgtaccttttctttttagaaagccaaatgtactttagacatgaatgcaactatttaaagaatagcttcatcaatgttattccttacatgtcataagattcttacttaaacttggtcttctttcaaattgtttgtatgaagatgctgtacccacttgaacagtcctcaggtgtttacataaatactatgttttacagttttcatattttaaaatattaataaagttaaatcacaatagt

SEQ ID NO: 6135 - protein, 208 aa, Homo sapiens
MKKNEVYETFSYPESYSPTLPVSRRENNSPSNLPRPSFCMEEYQRAELEEDPILSRTPSPVHPSDFSEHNCQPYYASDGATYGSSSGLCLGNPRADSIHNTYSTDHASAAPPSVTRSPVENDGYIEEGSITKHPSTWSVEAVVLFLKQTDPLALCPLVDLFRSHEIDGKALLLLTSDVLLKHLGVKLGTAVKLCYYIDRLKQGKCFEN

SEQ ID NO: 6136 - DNA, 324 bp, Homo sapiens
atgagcgagtcgatctcgaagtccagccagcccttggcctccaagcaggaaaaggatggcactgagaagcggagctggggcaggccgcgcaagcagcctctggtgagtcccaggacagcgctgggagggagtcagaaggagcccagtgaagtgccaaaacctaagagacctcagggccgaccaaatggaaggaaaaacaaggacgctgccaagacctggaaaaccaccacaactccaggaaggaaaccaaggggcagacccaaaaaactggagaaggaggaagaggagggcatctcacaggagtcctcggaggaggagcaatga

SEQ ID NO: 6137 - protein, 107 aa, Homo sapiens
MSESISKSSQPLASKQEKDGTEKRSWGRPRKQPLVSPRTALGGSQKEPSEVPKPKRPQGRPNGRKNKDAAKTWKTTTTPGRKPRGRPKKLEKEEEEGISQESSEEEQ

SEQ ID NO: 6138 - DNA, 1472 bp, Homo sapiens
actgaggcgtggcgtctgctggggcacctgaaggagacttgggggcacccgcgtcgtgcctcctgggttgtgaggagtcgccgctgccgccactgcctgtgcttcatgaggaagatgctcgccgccgtctcccgcgtgctgtctggcgcttctcagaagccggcaagcagagtgctggtagcatcccgtaattttgcaaatgatgctacatttgaaattaagaaatgtgaccttcaccggctggaagaaggccctcctgtcacaacagtgctcaccagggaggatgggctcaaatactacaggatgatgcagactgtacgccgaatggagttgaaagcagatcagctgtataaacagaaaattattcgtggtttctgtcacttgtgtgatggtcaggaagcttgctgtgtgggcctggaggccggcatcaaccccacagaccatctcatcacagcctaccgggctcacggctttactttcacccggggcctttccgtccgagaaattctcgcagagcttacaggacgaaaaggaggttgtgctaaagggaaaggaggatcgatgcacatgtatgccaagaacttctacgggggcaatggcatcgtgggagcgcaggtgcccctgggcgctgggattgctctagcctgtaagtataatggaaaagatgaggtctgcctgactttatatggcgatggtgctgctaaccagggccagatattcgaagcttacaacatggcagctttgtggaaattaccttgtattttcatctgtgagaataatcgctatggaatgggaacgtctgttgagagagcggcagccagcactgattactacaagagaggcgatttcattcctgggctgagagtggatggaatggatatcctgtgcgtccgagaggcaacaaggtttgctgctgcctattgtagatctgggaaggggcccatcctgatggagctgcagacttaccgttaccacggacacagtatgagtgaccctggagtcagttaccgtacacgagaagaaattcaggaagtaagaagtaagagtgaccctattatgcttctcaaggacaggatggtgaacagcaatcttgccagtgtggaagaactaaaggaaattgatgtggaagtgaggaaggagattgaggatgctgcccagtttgccacggccgatcctgagccacctttggaagagctgggctaccacatctactccagcgacccaccttttgaagttcgtggtgccaatcagtggatcaagtttaagtcagtcagttaaggggaggagaaggagaggttataccttcagggggctaccagacagtgttctcaacttggttaaggaggaagaaaacccagtcaatgaaattcaatgaaattcttggaaacttccattaagtgtgtagattgagcaggtagtaattgcatgcagtttgtacattagtgcattaaaagatgaattattgagtgctt

SEQ ID NO: 6139 - protein, 390 aa, Homo sapiens
MRKMLAAVSRVLSGASQKPASRVLVASRNFANDATFEIKKCDLHRLEEGPPVTTVLTREDGLKYYRMMQTVRRMELKADQLYKQKIIRGFCHLCDGQEACCVGLEAGINPTDHLITAYRAHGFTFTRGLSVREILAELTGRKGGCAKGKGGSMHMYAKNFYGGNGIVGAQVPLGAGIALACKYNGKDEVCLTLYGDGAANQGQIFEAYNMAALWKLPCIFICENNRYGMGTSVERAAASTDYYKRGDFIPGLRVDGMDILCVREATRFAAAYCRSGKGPILMELQTYRYHGHSMSDPGVSYRTREEIQEVRSKSDPIMLLKDRMVNSNLASVEELKEIDVEVRKEIEDAAQFATADPEPPLEELGYHIYSSDPPFEVRGANQWIKFKSVS

SEQ ID NO: 6140 - DNA, 1717 bp, Homo sapiens
gggcgcagcacactcccagccggccgcagcctgacacgccgcgcggccccccagtctcccgcggctgctcccccaggcatggcacagggcctcgcctcactatggcagcagcacggcacagcacgctcgacttcatgctcggcgccaaagctgatggtgagaccattctaaaaggcctccagtccattttccaggagcaggggatggcggagtcggtgcacacctggcaggaccatggctatttagcaacctacacaaacaagaacggcagctttgccaatttgagaatttacccacatggattggtgttgctggaccttcagagttatgatggtgatgcgcaaggcaaagaagagatcgacagtattttgaacaaagtagaggaaagaatgaaagaattgagtcaggacagtactgggcgggtgaaacgattaccacccatagtgcgaggaggagccatcgacagatactggcccaccgccgacgggcgcctggttgaatatgacatagatgaagtggtatatgacgaagattcaccttatcaaaatataaaaattctacactcgaagcagtttggaaatattctcatccttagtggggatgttaatttggcagagagtgatttggcatatacccgggccatcatgggcagtggcaaagaagattacactggcaaagatgtactcattctgggaggtggagacggaggcatattgtgtgaaatagtcaaactaaaaccaaagatggtcactatggtagagattgaccaaatggtgattgatgggtgtaagaaatacatgcgaaaaacgtgtggcgatgtcttagacaatcttaaaggagactgctatcaggttctaatagaagactgtatcccggtactgaagaggtacgccaaagaagggagagaatttgattatgtgattaatgatttgacagctgttccaatctccacgtctccagaagaagattccacatgggagtttctcagactgattcttgacctctcaatgaaagtgttgaaacaggatgggaaatattttacacaggggaactgtgtcaatctgacagaagcactgtcgctctatgaagaacagctggggcgcctgtattgtcctgtggaattttcaaaggagatcgtctgtgtcccttcatacttggaattgtgggtattttacactgtttggaagaaagctaaaccctgaagatcagtagcccctaatcacatgtgctgcaaatagccttcctgacctccatatgctgtacatgacatcaaaatgagtcaggcaattgattgtgaattccttaaagttttcctttttttaataattatttttaatttaaaaaagcaaatggaaaatgtatattttgatgagcttagggtgttttttttttgaaagtcagctgaaggatggttagacagcacagcgaagactgctaaatgcactgaccccccccattagaatgtgatttttgttcctttttatttctctgtgggcttttgtttttgtttttgttttggtagatcttcaatttggatatttggaggagtgaacatcgttgttttgctggagggaagatcttgatggtgtttctttccccaaaaattgacttagatattaaaatttggtgcttataagagagagttaaaaaaaaataggattgcttcaattaaaattacaaaagagacaaaaaaaaaaaaaaaaaaaaaaaaaaaaaa

SEQ ID NO: 6141 - protein, 366 aa, Homo sapiens
MAAARHSTLDFMLGAKADGETILKGLQSIFQEQGMAESVHTWQDHGYLATYTNKNGSFANLRIYPHGLVLLDLQSYDGDAQGKEEIDSILNKVEERMKELSQDSTGRVKRLPPIVRGGAIDRYWPTADGRLVEYDIDEVVYDEDSPYQNIKILHSKQFGNILILSGDVNLAESDLAYTRAIMGSGKEDYTGKDVLILGGGDGGILCEIVKLKPKMVTMVEIDQMVIDGCKKYMRKTCGDVLDNLKGDCYQVLIEDCIPVLKRYAKEGREFDYVINDLTAVPISTSPEEDSTWEFLRLILDLSMKVLKQDGKYFTQGNCVNLTEALSLYEEQLGRLYCPVEFSKEIVCVPSYLELWVFYTVWKKAKP

SEQ ID NO: 6142 - DNA, 3591 bp, Homo sapiens
  unsure 2378: unknown base
  unsure 2516: unknown base
gtcagccagtcagtccgccagtccgccagcccagtacctctctctcctcggccctcgtaagctgtccgcggtctgtttggcccgaacggcggcggaggcgctgatcatggcgacattcatctcggtgcagctgaaaaagacctcagaggtggacctggccaagccgctggtgaagttcatccagcagacttacccaagcggcggggaagagcaggcccagtactgccgcgcggcggaggagctcagcaagctgcgccgcgccgcagtcggtcgtccgctggacaagcacgagggcgcgctcgagacgctcctgagatattatgatcagatttgttctattgaacccaaattcccattttctgaaaatcagatctgcttgacatttacctggaaggatgctttcgataaaggttcactttttggaggctctgtaaaactggctcttgcaagcttaggatatgaaaagagctgtgtgttgttcaattgtgcagccttagctagccaaattgcagcagaacagaacctggataatgatgaaggattgaaaatcgctgctaaacattaccagtttgctagtggtgcctttttacatattaaagagacggttttatctgccttaagtcgagagccgaccgtggacatatctccagatactgttgggaccctcagtcttattatgctggcacaggctcaagaagtattttttttaaaagccacaagagataaaatgaaagatgccatcatagctaaattggctaatcaggctgcagattattttggtgatgctttcaaacagtgtcaatacaaagatactctccccaaggaggtgttccctgtcttggctgcaaagcactgtatcatgcaggccaatgctgagtaccatcagtctatcctggcaaaacagcagaagaaatttggagaagaaattgcaaggttacagcatgcagcagaactgattaaaacagtggcatctcgctatgatgaatatgttaatgtgaaggatttttctgacaaaatcaatcgtgcccttgctgcagcaaagaaggataatgacttcatttatcatgatcgagttccagaccttaaagatctagatcctattggcaaagccacacttgtgaaatctaccccggtcaatgtacccatcagtcagaaatttactgatctgtttgagaagatggttcccgtgtcagtacagcagtctttggctgcctataatcagaggaaagccgatttggttaacagatcaattgctcagatgagagaagccaccactttggcaaatggggtgctagcttcccttaatcttccagcagcaattgaagatgtgtctggagacactgtacctcagtctatattgactaaatccagatctgtgattgaacagggaggcatccagactgttgatcagttgattaaagaactgcctgaattactgcaacgaaatagagaaatcctagatgagtcattaaggttgttggatgaagaagaagcaaccgataatgatttaagagcaaaatttaaggaacgttggcaaaggacaccatccaatgaactgtataagcctttaagagcagagggaaccaacttcagaacagttttagataaagctgtgcaggcagatggacaagtgaaagaatgttaccagtctcatcgtgacaccatcgtgcttttgtgtaagccagagcctgagctgaatgctgccatcccttctgctaatccagcaaagaccatgcagggcagtgaggttgtaaatgtcttaaaatccttattgtcaaatcttgatgaagtaaagaaggaaagagagggtctggagaatgacttgaaatctgtgaattttgacatgacaagcaagtttttgacagccctggctcaagatggtgtgataaatgaagaagctctttctgttactgaactagatcgagtctatggaggtcttacaactaaagtccaagaatctctaaagaaacaggagggacttcttaaaaatattcaggtctcacatcaggaattttcaaaaatgaaacaatctaataatgaagctaacttaagagaagaagttttgaagaatttagctactgcatatgacaactttgttgaacttgtagctaatttgaaggaaggcacaaagttttacaatgagttgactgaaatcctggtcaggttccagaacaaatgcagtgatatagtttttgcacggaagacagaaagagatgaactcttaaaggacttgcaacaaagcattgccagagaacctagtgctcgtacaattcctacacctgcgtatcagtcctcaccagcaggaggacatgcaccactcctccaactccagcgccaagaaccatgccgcctactaagccccagcccccagccaggcntccaccacctgtgtttccagcaaatcgagctccttctgctactgctccatctccagtgggggctgggactgctgcgccagctccatcacaaacgcctggctcagctcctcctccacaggcgcagggaccaccctattnccccctatccaggatatcctgggtattgccaaatgcccatgcccatgggctataatccttatgcgtatggccagtataatatgccatatccaccagtgtatcaccagagtcctggacaggctccatacccgggaccccagcagccttcataccccttccctcagcccccacagcagtcttactatccacagcagtaatatgtctgctcagcagctcagctgattcagatcagagggaaagaaataccaaccctgcaataagtgtactaaactctacgctctggttaatgtaatgtactctcctggactgaatgcagtgtataatttctgtctacagctagaagctgtgccccagttccacatttgattacacatgtgagatttgctgctgttgcagtataaacactaggtataataggatttgaaattgcattacagttcataaaaattgaaaatgagaaattaaacctgcaagtgaaacatttgaaacgattatactttctacataagacatggttgggacatcagatacttacaaagatggtttaagtatggatactagagaaaattaagttttctttctctttggtttattgatttggtttaatttccattatgctattttgcataatcaaggcactgtaaatcttataattttaaaataaattacttaagaacagttgtcattgttatgttttgttattgattctcattactgtctaattttttttctggtattagtctcattttgtatgtatataagttaaacagatactgtttttaagtgcatgaatagtacaagttattatcaaggatgttttacagggaaatcaaaagaatattatcatactttatctttcgtatgctgattagtaaacgatttttgacatttattttagaaagtcctataatgtggaagaaacaaacagttgctaccaaagattcttcaaataaacatacaaataaatgtgtatatttaatgttttattgttagcttctccagaaaattgatgcaaattctggtaataattcttgcattttttccccaataacctggttaaaatagaatacgccat

SEQ ID NO: 6143 - DNA, 2646 bp, Homo sapiens
tttccttcctcttttggcaacatggcgggcggagaagctggagtgactctagggcagccgcatctttcgcgtcaggatctcaccaccttggatgttaccaagttgacgccactttcacacgaagttatcagcagacaagccacaattaacataggtacaattggtcatgtagctcatgggaaatccacagtcgtcaaagctatttctggagttcatactgtcaggttcaaaaatgaactagaaagaaatattacaatcaagcttggatatgctaatgctaagatttataagcttgatgacccaagttgccctcggccagaatgttatagatcttgtgggagcagtacacctgacgagtttcctacggacattccagggaccaaagggaacttcaaattagtcagacatgtttcctttgttgactgtcctggccacgatattttgatggctactatgctgaacggtgcagcagtgatggatgcagctcttctgttgatagctggtaatgaatcttgccctcagcctcagacatcggaacacctggctgctatagagatcatgaaactgaagcatattttgattctacaaaataaaattgatttggtaaaagaaagtcaggctaaagaacaatacgagcagatccttgcatttgtccaaggtacagtagcagagggagctcccattattccaatttcagctcagctgaaatacaatattgaagttgtttgtgagtacatagtaaagaaaattccagtacccccaagagactttacttcagagccccggcttattgttattagatcttttgatgtcaacaaacctggctgtgaagttgatgaccttaagggaggtgtagctggtggtagtatcctaaaaggagtattaaaggtgggccaggagatagaagtaagacctggtattgtttccaaagatagtgaaggaaaactcatgtgtaaaccaatcttttccaaaattgtatcactttttgcggagcataatgatctgcaatatgctgctccaggcggtcttattggagttggaacaaaaattgaccccactttgtgccgggctgacagaatggtggggcaagtacttggtgcagtcggagctttacctgagatattcacagaattggaaatttcctatttcctgcttagacggcttctaggtgtacgcactgaaggagacaagaaagcagcaaaggttcaaaagctgtctaagaatgaagtgctcatggtgaacataggatccctgtcaacaggagggagagttagtgctgtcaaggccgatttgggtaaaattgttttgaccaatccagtgtgcacagaggtaggagaaaaaattgcccttagccgaagagttgaaaaacactggcgtttaattggttggggtcagataagaagaggagtgacaatcaagccaacagtagatgatgactgaagaataccagttaaataatacattcggatggatttggaagttggaattcctcttaacaaccaaggggtttattttcaaagcaatattggggaattgatttcacagttcgttaccttagtaggtaacggtaaggttattctctttttttttttttttggttatgaaaacttagggactaaaattaatataaaaattggcataatgttggattgaatctacattttggcagaagttaaacattcccacataatgtcaaaattatacatcatgcagttctgtttttttgtttgtttaattttgttttgtttttgagtctggctctgtcacccaggctggagtgcagtggcgtgatctgcaacctctgccccccgggttcaagcgattctcctgcctcagcctcccgagtagctgagattacaggtgcgcgccaccacacttggctaatttttgtattattagtagagacggggtttcagcatgttggctaggccggtctctcctgacctcagggtgatcagcccacctcggcctcacaaagtgctgggattacaggcgtgagccaccttgcccagcccacatcatacagtttgaaatgaaactttgccacaaccagcctttgctgtagcacacacatatatcactgaacctgtttgaaataaagttttttttctttttcatgattcgtctttgagtacctccaggctgaaagactgttgtaccagtaaaaacttaaaggcacaaattctccttgaagaccttctcccttttatgtggccccatattttatgttgctttatctttgaaattttgcatgaaaaggaaatgaatggattcgaatgaaattgtcctttagagcatgattacttgttcccatggacaaatatttttctccccttgctcttcctggcctgaaacacgggaaaccagagtcaaaagttatctccctctccctgtgatgccttgagatttttttctgcgttgtttaatgcctgaaatccaagtcttcctccatgggaaaatactgttataccaaataattctagatgagtaacaaagatctttttaggccttcattttatgttttttcttaactgttatattatgattgtgacatagattatactactactaatttttggatgtttcaaaaggtcaagaagtaaaagatgttagaaagcaaaaaaaaaaaaaaaaaaaaaaaaaaaa

SEQ ID NO: 6144 - protein, 472 aa, Homo sapiens
MAGGEAGVTLGQPHLSRQDLTTLDVTKLTPLSHEVISRQATINIGTIGHVAHGKSTVVKAISGVHTVRFKNELERNITIKLGYANAKIYKLDDPSCPRPECYRSCGSSTPDEFPTDIPGTKGNFKLVRHVSFVDCPGHDILMATMLNGAAVMDAALLLIAGNESCPQPQTSEHLAAIEIMKLKHILILQNKIDLVKESQAKEQYEQILAFVQGTVAEGAPIIPISAQLKYNIEVVCEYIVKKIPVPPRDFTSEPRLIVIRSFDVNKPGCEVDDLKGGVAGGSILKGVLKVGQEIEVRPGIVSKDSEGKLMCKPIFSKIVSLFAEHNDLQYAAPGGLIGVGTKIDPTLCRADRMVGQVLGAVGALPEIFTELEISYFLLRRLLGVRTEGDKKAAKVQKLSKNEVLMVNIGSLSTGGRVSAVKADLGKIVLTNPVCTEVGEKIALSRRVEKHWRLIGWGQIRRGVTIKPTVDDD

SEQ ID NO: 6145 - DNA, 439 bp, Homo sapiens
ctctctccggtctgtgcctccaagatgacaaagaaaagaaggaacaatggtcgtgccaaaaagggccgcggccacgtgcagcctattcgctgcactaaatgtgcccgatgcgtgcccaaggacaaggccattaagaaattcgtcattcgaaacatagtggaggccgcagcaatcagggacatttctgaagcgagcgtcttcgatgcctatgtgcttcccaagctgtatgtgaagctacattactgtgtgagttgtgcaattcacagcaaagtagtcaggaatcgatctcgtgaagcccgcaaggaccgaacacccccaccccgatttagacctgcgggtgctgccccacgtcccccaccaaagcccatgtaaggagctgagttcttaaagactgaagacaggctattctctggagaaaaataaaatggaaattgtactt

SEQ ID NO: 6146 - DNA, 683 bp, Homo sapiens
ctctttctgctgctccccagctctcggatacagccgacaccatgggtttcagagacctgaaaagccccgccggcctccaggtgctcaacgattacctggcggacaagagctacatcgaggggtatgtgccatcacaagcagatgtggcagtatttgaagccgtgtccagcccactgcctgccgacttgtgtcatgccctacgttggtataatcacatcaagtcttacgaaaaggaaaaggccagcctgccaggagtgaagaaagctttgggcaagtatggtcctgccgatgtggaagacactacaggaagtggagctacagatagtaaagatgatgatgacattgacctctttggatctgatgatgaggaggaaagtgaagaagcaaagaggctaagggaagaacgtcttgcacaatatgaatcaaagaaagccaatgatgagacagatatggcgaaattagaggagcgcgtcagaagcattcaagcagacggcttagtctggggctcatctaaactagttccagtgggatacggaattaagaaacttcaaatacagtgtgtagttgaagatgataaagtcggaacagatatgctggaggagcagatcactgcttttgaggactacgtgcagtccatggatgtggctgctttcaacaagatctaaaatccatcctggatcatg

SEQ ID NO: 6147 - DNA, 1613 bp, Homo sapiens
atcctgacttccgctttggaggcgaggacccgagcgagtgtagggggtgcggcgtctggtcagccaggggtgaattctcaggactggtcggcagtcaagccatcatgcctcgtggtcagaagagtaagctccgtgcccgtgagaaacgccgcaaggcccgagatgagacccggggtctcaatgttcctcaggtcactgaagcagaggaagaagaggccccctgctgttcctcttctgtttctgggggtgctgcttcaagctctcctgctgctggcattccccagaagcctcagagagccccaaccactgccgctgctgcggctgcgggtgtttcatccacaaaatctaaaaaaggtgccaagagccaccaaggtgagaaaaatgcaagttcctcccaggcctcaacatccactaagagcccaagcgaagatcctctaaccaggaagtcagggtcgttggtgcagttcctgttgtacaagtataaaataaaaaagtccgttacaaagggagaaatgctgaaaattgttggcaaaaggttcagggagcacttccctgagatcctcaagaaagcctctgagggcctcagtgttgtctttggccttgagctgaataaagtcaaccccaacggccacacttacaccttcatcgacaaggtagacctcactgatgaggaatccctgctcagttcctgggactttcccaggagaaagcttctgatgcctctcctgggtgtgatcttcttaaatggcaactcagctactgaggaagagatctgggaattcctgaatatgttgggagtctatgatggagaggagcactcagtctttggggaaccctggaagctcatcaccaaagatctggtgcaggaaaaatatctggagtacaagcaggtgcccagcagtgatcccccacgctttcaattcctgtggggtccgagagcctatgctgaaaccagcaagatgaaagtcctggagtttttggccaaggtaaatggtaccaccccctgtgccttcccaacccattacgaagaagctttgaaagatgaagagaaagccggagtctgagccagagttgtagccaggccttgcactactgccatagccaatcaatctcccaaagccaagtttacctgctgttctcacccccaatgaggtcttaggcagattctttactttgtaattcaaaaggcctgttaacctttgttcttgttatgcatgaataacttgttgactttttttttttctctttttcaactagtgtttcaacaggtttatttagattcagaatgtaaatttacaaatgatatagatcaccctgttattgctgtttttcagggacagtagaaagtgttttgttttttgagtgaaacaacttattaataaaaatccttaaatcacttttgtaatccaggacaagaaaatgtggcattagagtagaaatatctttggaaatgtgaaagaccccatagtgaaatatttgggatcagaagccagaggtgtaaaagtggtcaattcttggtttacttcatttaatctttcttttcataaagatacatacctggatttgtttatgttattcaagaatgtgtgagaaattaaaccatagttagttaa

SEQ ID NO: 6148 - protein, 319 aa, Homo sapiens
MPRGQKSKLRAREKRRKARDETRGLNVPQVTEAEEEEAPCCSSSVSGGAASSSPAAGIPQKPQRAPTTAAAAAAGVSSTKSKKGAKSHQGEKNASSSQASTSTKSPSEDPLTRKSGSLVQFLLYKYKIKKSVTKGEMLKIVGKRFREHFPEILKKASEGLSVVFGLELNKVNPNGHTYTFIDKVDLTDEESLLSSWDFPRRKLLMPLLGVIFLNGNSATEEEIWEFLNMLGVYDGEEHSVFGEPWKLITKDLVQEKYLEYKQVPSSDPPRFQFLWGPRAYAETSKMKVLEFLAKVNGTTPCAFPTHYEEALKDEEKAGV

SEQ ID NO: 6149 - DNA, 1318 bp, Homo sapiens
ctcctctaggccgccggccgcgaagcgctgagtcacggtgaggcgactggacccacactctcttaacctgccctccctgcactcgctcccggcggctcttcgcgtcacccccgccgctaaggctccaggtgccgctaccgcagcgtgagtacctggggctcctgcaggggtccactagccctccatcctctacagctcagcatcagaacactctctttttagactccgatatggggtcctccaagaaagttactctctcagtgctcagccgggagcagtcggaaggggttggagcgagggtccggagaagcattggcagacccgagttaaaaaatctggatccgtttttactgtttgatgaatttaaaggaggtagaccaggaggatttcctgatcatccacatcgaggttttgaaacagtatcctacctcctggaagggggcagcatggcccatgaagacttctgtggacacactggtaaaatgaacccaggagatttgcagtggatgactgcgggccggggcattctgcacgctgagatgccttgctcagaggagccagcccatggcctacaactgtgggttaatttgaggagctcagagaagatggtggagcctcagtaccaggaactgaaaagtgaagaaatccctaaacccagtaaggatggtgtgacagttgctgtcatttctggagaagccctgggaataaagtccaaggtttacactcgcacaccaaccttatatttggacttcaaattggacccaggagccaaacattcccaacctatccctaaagggtggacaagcttcatttacacgatatctggagatgtgtatattgggcccgatgatgcacaacaaaaaatagaacctcatcacacagcagtgcttggagaaggtgacagtgtccaggtggagaacaaggatcccaagagaagccactttgtcttaattgctggggagccattaagagaaccagttatccaacatggtccatttgtgatgaacaccaatgaagagatttctcaagctattcttgatttcagaaacgcaaaaaatgggtttgaaagggccaaaacctggaaatcaaagattgggaactagtggaaagcggaagagcaggtcttgatgtgtcctagaattttgccatttctgagattgagccattgaaggcattccatttctaaagcttatttagccggtgcttctaaagaattccacactaacgtgataacatggtttttgtaacaataaatgtaggatatttcctggcacatgcaaataaacctaatcattgtttctttaaaaaaaaaaaaaaa

SEQ ID NO: 6150 - protein, 290 aa, Homo sapiens
MGSSKKVTLSVLSREQSEGVGARVRRSIGRPELKNLDPFLLFDEFKGGRPGGFPDHPHRGFETVSYLLEGGSMAHEDFCGHTGKMNPGDLQWMTAGRGILHAEMPCSEEPAHGLQLWVNLRSSEKMVEPQYQELKSEEIPKPSKDGVTVAVISGEALGIKSKVYTRTPTLYLDFKLDPGAKHSQPIPKGWTSFIYTISGDVYIGPDDAQQKIEPHHTAVLGEGDSVQVENKDPKRSHFVLIAGEPLREPVIQHGPFVMNTNEEISQAILDFRNAKNGFERAKTWKSKIGN

SEQ ID NO: 6151 - DNA, 1280 bp, Homo sapiens
ctctctgctcctcctgttctacagtcagccgcatcttcttttgcatcgtcagccaaaccacatccctgagacaccatggggaaggtgaaggtcggagtcaacagatttggtcgtactgggcgcctggtcaccagggctgcttttaactctggtaaagtggatattgttgccatcaatgaccccttcattgacctgaactacatggtttacatgttccaatatgactccacccatagcaaattccatggcaccgtcaaggctgagaatgggaagcttgtcatcaatggaaatcccatcaccatcttccaggagcgagatccctccaaaatcaagtggggcgatgctggcgctgagtacgtcatggagtccactggcgtcttcaccaccatgtagaaggctgggcctcatttgcaggggggagccaaaagggtcatcatctctgccccctctgctgatgccccaatgtttgtcatgggtgtgaaccatgagaagtatgacaacaacctcaagattgtcggcagtgccttctgcaccaccaactgcttagcacccctggccaaggtcatccatgacaactttggtatcgtggaaggactcatgaccatagtccacgccatcactgccacccagaagactgtggatggcccctccgggaaactgtggcgtgatggccacggggctctccagaacatcatccctgcctctactggcactgcgaaggctatgggcaaggtcatccctgagctgaacgggaagctcactggcatggccttctgtgtccccactgccgtgtcagtggtggacctgacctgccgtctggaaaaacctgccaaatatgatgacaccaagaaggtggtgaagcaggcatcggagggccccctcaagggcatcctgggctacactgagcaccaggtggtctcctccgacttcaacagcaacacccactcttccaccttcaatgctggggctgtcattgccctcaacaaccactttttcaagctcatttcctggtatgacaatgaatttggctacagcaacaggatggtggacctcatggcccacatggcctccaaggagtaagacccctggaccaccagccccagtaagagcacaagaggaagagagagaccctcactgctggggagtccctgccacactcagtcccccaccacactgaatctcccctcctcacagtttccatgtagaccccttgaagaggggaggggcctagggagccccaccttgtcatataccatcaataaagtaccctgtgctcagcc

SEQ ID NO: 6152 - DNA, 658 bp, Homo sapiens
cttttgcatcgtcagccaaaccacatccctgagacaccatggggaaggtgaaggtcggagtcaacagatttggtcgtactgggcgcctggtcaccagggctgcttttaactctggtaaagtggatattgttgccatcaatgaccccttcattgacctgaactacatggtttacatgttccaatatgactccacccatagcaaattccatggcaccgtcaaggctgagaatgggaagcttgtcatcaatggaaatcccatcaccatcttccaggagcgagatccctccaaaatcaagtggggcgatgctggcgctgagtacgtcatggagtccactggcgtcttcaccaccatgtagaaggctgggcctcatttgcaggggggagccaaaagggtcatcatctctgccccctctgctgatgccccaatgtttgtcatgggtgtgaaccatgagaagtatgacaacaacacccactcttccaccttcaatgctggggctgtcattgccctcaacaaccactttttcaagctcatttcctggtatgacaatgaatttggctacagcaacaggatggtggacctcatggcccacatggcctccaaggagtaagacccctggaccaccagccccagtaagagcacaagaggaagagagagacc

SEQ ID NO: 6153 - DNA, 4268 bp, Homo sapiens
cctctgccaccatggggaactgggctgtgaatgaggggctctccatttttgtcattctggtttggctggggttgaacgtcttcctctttgtctggtattaccgggtttatgatattccacctaagttcttttacacaagaaaacttcttgggtcagcactggcactggccagggcccctgcagcctgcctgaatttcaactgcatgctgattctcttgccagtctgtcgaaatctgctgtccttcctcaggggttccagtgcgtgctgctcaacaagagttcgaagacaactggacaggaatctcacctttcataaaatggtggcatggatgattgcacttcactctgcgattcacaccattgcacatctatttaatgtggaatggtgtgtgaatgcccgagtcaataattctgatccttattcagtagcactctctgaacttggagacaggcaaaatgaaagttatctcaattttgctcgaaagagaataaagaaccctgaaggaggcctgtacctggctgtgaccctgttggcaggcatcactggagttgtcatcacgctgtgcctcatattaattatcacttcctccaccaaaaccatccggaggtcttactttgaagtcttttggtacacacatcatctctttgtgatcttcttcattggccttgccatccatggagctgaacgaattgtacgtgggcagaccgcagagagtttggctgtgcataatataacagtttgtgaacaaaaaatctcagaatggggaaaaataaaggaatgcccaatccctcagtttgctggaaaccctcctatgacttggaaatggatagtgggtcccatgtttctgtatctctgtgagaggttggtgcggttttggcgatctcaacagaaggtggtcatcaccaaggtggtcactcaccctttcaaaaccatcgagctacagatgaagaagaaggggttcaaaatggaagtgggacaatacatttttgtcaagtgcccaaaggtgtccaagctggagtggcacccttttacactgacatccgcccctgaggaagacttctttagtatccatatccgcatcgttggggactggacagaggggctgttcaatgcttgtggctgtgataagcaggagtttcaagatgcgtggaaactacctaagatagcggttgatgggccctttggcactgccagtgaagatgtgttcagctatgaggtggtgatgttagtgggagcagggattggggtcacacccttcgcatccattctcaagtcagtctggtacaaatattgcaataacgccaccaatctgaagctcaaaaagatctacttctactggctgtgccgggacacacatgcctttgagtggtttgcagatctgctgcaactgctggagagccagatgcaggaaaggaacaatgccggcttcctcagctacaacatctacctcactggctgggatgagtctcaggccaatcactttgctgtgcaccatgatgaggagaaagatgtgatcacaggcctgaaacaaaagactttgtatggacggcccaactgggataatgaattcaagacaattgcaagtcaacaccctaataccagaataggagttttcctctgtggacctgaagccttggctgaaaccctgagtaaacaaagcatctccaactctgagtctggccctcggggagtgcatttcattttcaacaaggaaaacttctaacttgtctcttccatgaggaaataaatgtgggttgtgctgccaaatgctcaaataatgctaattgataatataaataccccctgcttaaaaatggacaaaaagaaactataatgtaatggttttcccttaaaggaatgtcaaagattgtttgatagtgataagttacatttatgtggagctctatggttttgagagcacttttacaaacattatttcatttttttcctctcagtaatgtcagtggaagttagggaaaagattcttggactcaattttagaatcaaaagggaaaggatcaaaaggttcagtaacttccctaagattatgaaactgtgaccagatctagcccatcttactccaggtttgatactctttccacaatactgagctgcctcagaatcctcaaaatcagtttttatattccccaaaagaagaaggaaaccaaggagtagctatatatttctactttgtgtcatttttgccatcattattatcatactgaaggaaattttccagatcattaggacataatacatgttgagagtgtctcaacacttattagtgacagtattgacatctgagcatactccagtttactaatacagcagggtaactgggccagatgttctttctacagaagaatattggattgattggagttaatgtaatactcatcatttaccactgtgcttggcagagagcggatactcaagtaagttttgttaaatgaatgaatgaatttagaaccacacaatgccaagatagaattaatttaaagccttaaacaaaatttatctaaagaaataacttctattactgtcatagaccaaaggaatctgattctccctagggtcaagaacaggctaaggatactaaccaataggattgcctgaagggttctgcacattcttatttgaagcatgaaaaaagagggttggaggtggagaattaacctcctgccatgactctggctcatctagtcctgctccttgtgctataaaataaatgcagactaatttcctgcccaaagtggtcttctccagctagcccttatgaatattgaacttaggaattgtgacaaatatgtatctgatatggtcatttgttttaaataacacccaccccttattttccgtaaatacacacacaaaatggatcgcatctgtgtgactaatggtttatttgtattatatcatcatcatcatcctaaaattaacaacccagaaacaaaaatctctatacagagatcaaattcacactcaatagtatgttctgaatatatgttcaagagagagtctctaaatcactgttagtgtggccaagagcagggttttctttttgttcttagaactgctcccatttctgggaactaaaaccagttttatttgccccaccccttggagccacaaatgtttagaactcttcaacttcggtaatgaggaagaaggagaaagagctgggggaagggcagaagactggtttaggaggaaaaggaaataaggagaaaagagaatgggagagtgagagaaaataaaaaaggcaaaagggagagagaggggaagggggtctcatattggtcattccctgccccagatttcttaaagtttgatatgtatagaatataattgaaggaggtatacacatattgatgttgttttgattatctatggtattgaatcttttaaaatctggtcacaaattttgatgctgagggggattattcaagggactaggatgaactaaataagaactcagttgttctttgtcatactactattcctttcgtctcccagaatcctcagggcactgagggtaggtctgacaaataaggcctgctgtgcgaatatagcctttctgaaatgtaccaggatggtttctgcttagagacacttaggtccagcctgttcacactgcacctcaggtatcaattcatctattcaacagatatttattgtgttattactatgagtcaggctctgtttattgtttcaattctttacaccaaagtatgaactggagagggtacctcagttataaggagtctgagaatattggccctttctaacctatgtgcataattaaaaccagcttcatttgttgctccgagagtgtttctccaaggttttctatcttcaaaaccaactaagttatgaaagtagagagatctgccctgtgttatccagttatgagataaaaaatgaatataagagtgcttgtcattataaaagtttccttttttattctctcaagccaccagctgccagccaccagcagccagctgccagcctagctttttttttttttttttttttttagcacttagtatttagcatttattaacaggtactctaagaatgatgaagcattgtttttaatcttaagactatgaaggtttttcttagttcttctgcttttgcaattgtgtttgtgaaatttgaatacttgcaggctttgtatgtgaataattctagcgggggacctgggagataattcctacggggaattcttaaaactgtgctcaactattaaaatgaatgagctttc

SEQ ID NO: 6154 - protein, 570 aa, Homo sapiens
MGNWAVNEGLSIFVILVWLGLNVFLFVWYYRVYDIPPKFFYTRKLLGSALALARAPAACLNFNCMLILLPVCRNLLSFLRGSSACCSTRVRRQLDRNLTFHKMVAWMIALHSAIHTIAHLFNVEWCVNARVNNSDPYSVALSELGDRQNESYLNFARKRIKNPEGGLYLAVTLLAGITGVVITLCLILIITSSTKTIRRSYFEVFWYTHHLFVIFFIGLAIHGAERIVRGQTAESLAVHNITVCEQKISEWGKIKECPIPQFAGNPPMTWKWIVGPMFLYLCERLVRFWRSQQKVVITKVVTHPFKTIELQMKKKGFKMEVGQYIFVKCPKVSKLEWHPFTLTSAPEEDFFSIHIRIVGDWTEGLFNACGCDKQEFQDAWKLPKIAVDGPFGTASEDVFSYEVVMLVGAGIGVTPFASILKSVWYKYCNNATNLKLKKIYFYWLCRDTHAFEWFADLLQLLESQMQERNNAGFLSYNIYLTGWDESQANHFAVHHDEEKDVITGLKQKTLYGRPNWDNEFKTIASQHPNTRIGVFLCGPEALAETLSKQSISNSESGPRGVHFIFNKENF

SEQ ID NO: 6155 - DNA, 930 bp, Homo sapiens
aaaacaccaaatggcggatgacgccggtgcagcgaggagggtccggaggccctggtggccctgggatggggaaccgcggtggcttccgcggaggtttcggcagtggcatccggggccggggtcgcggccgtggacggggccggggccgaggccgcggagctcgcggaggcaaggccgaggataaggagtggatgcccgtcaccaagttgggccgcttggtcaaggacatgaagatcaagtccctggaggagatatatctcttctccctgcccattaaggaatcagagatcattgacttttgcttgggggcctctctcaaggatgaggttttgaagattatgccagtgcagaagcagatccgtgccggccagcgcaccaggttcaaggcgtttgttgctatcggggactacaatggccacgtcggtctgggtgttaagtgttccaaggaggtggccaccgccatccgtggggccatcatcctggccaagctctccattgtccccgtgcgcagaggctactggaggaacaagatcggcaagccccacaccgtcccttgcaaggtgacaggccgctgcggctctgtgctggtgcgcctcatccctgcacccaggggcactggcatcgtctccgcacctgtgcctaagaagctgcttatgatggctggtatcgatgactgctacacctcagcccggggctgcactgccaccctgggcaacttcgccaaggccacctttgatgccatttctaagacctacagctacctgacccccgacctctggaaggagactgtatttaccaagtctccctatcaggaattcactgaccacctcgtcaagacccacaccagagtctccgtgcagcggactcaggctccagctgtggctacaacatagggtttttacacaagaaaaataaagtgaattaagcgtg

SEQ ID NO: 6156 - protein, 233 aa, Homo sapiens
MPVTKLGRLVKDMKIKSLEEIYLFSLPIKESEIIDFCLGASLKDEVLKIMPVQKQIRAGQRTRFKAFVAIGDYNGHVGLGVKCSKEVATAIRGAIILAKLSIVPVRRGYWRNKIGKPHTVPCKVTGRCGSVLVRLIPAPRGTGIVSAPVPKKLLMMAGIDDCYTSARGCTATLGNFAKATFDAISKTYSYLTPDLWKETVFTKSPYQEFTDHLVKTHTRVSVQRTQAPAVATT

SEQ ID NO: 6157 - DNA, 2655 bp, Homo sapiens
gaacatccagtcatggataaaaatgagctggttcagaaggccaaactggccgagcaggctgagcgatatgatgacatggcagcctgcatgaagtctgtaactgagcaaggagctgaattatccaatgaggagaggaatcttctctcagttgcttataaaaatgttttaggagcccgtaggtcatcttggagggtcgtctcaagtattgaacaaaagacggaaggtgctgagaaaaaacagcagatggctcgagaatacagagagaaagttgatacggagctaagagatatctgcaatgatgtactgtttcttttggaaaagttcttgatccccagtgcttcacaagcagagagcaaagtcttctctttgaaaatgaaaggagattactaccattacttggcagaggttgccactggtgatgacaagaaagggattgtggatcagtcacaacaagcataccaagaagcttttgaaatcagcaaaaaggaaatgcaaccaacacatcctatcagaccaggtctggcccttaacttctctgtgttctattatgagattctgaactccccagagaaagcctgctctcttgcaaagacagcttttgatgaagccattgctgaacttgatacattaattgaagagtcatacaaagacagcatgctaataatgcaattactgagagacaacttgacattgtggacatcagatacccaaggagacgaagctgaagcaggagaaggaggggaaaattaaccggccttccaacttttgtgtgcctcattctaaaatttacacagtagaccatttgtcatccatgctgtcccacaaagttttttatttacgatttatgacaggtttatgttacttctatttgaatttctatgtttcccatgtggttttcatgtttaatattaggggagtagagccagttaacatttagggagttacctgttttcatcttgaggtggccaatatggggatgtggaatttttatacaagttataaatgtttggcatagtacttttggtacattgtggcttcacaagggccagggtaaaactgcttccctgtccaagcaaagaaaactgcctacatattggtttgtcctggtggggaataaaagggatcattggttccagtcacaggtgtagtaattgtgggtactttaaggtttggagcacttacaaggctgtggtagaaacataccccatggataccacatattaaaccatgtatatctgtggaatactcaatctcaatgtgcacacctttgactacaactgcagaagtgttcctttagacaaagttgtgacccattttactctggataagggcagaaacggttcacattccattatttgtaaagttacctgctgttagctttcattatttttgctacactcattttatttgtatctaaatgttttaggcaacctaagaacaaatgtaaaagtaaagatgcaggaaaaatgaattgcttggtattcattacttcatctgtatcaagcacagcagtaaaacaaaaacccatgtatttaactttttttttttaggttttttgcttttgtgattttttttttgatacttgcctaacatgcatgtgctgtataacaatccaagcataattgttaagaacacatgtattaaattcatgtaagtggaataaaagttttatgaatggacttttcaactactttctctacagcttttcatgtaaattagtcttttggttctgaaacttctctaaaggaaattgtacattttttgaaatttattccttattccctcttggcagctaatgggcttttaccaagtttaaacacaaaatttatcataacaacaaaaatactactaatataactactgtttccatgtcccgtgatcccctctcttcctccccaccctgaaaaaaatgagttccaatttttttgggagaggggagattgattagaaaaaaatgtaatatgttccatttaaaattttggcgtatggcattttctaacttaggaagccacaatgttcttggcccgtcatgacattgggtagcattaactataagttttgtgcttccaaatcactttttggtttttaagaatttcttgatactcttatagtctgccttcaattttgatcctttattctatttgtcaggtgcacaagattaccttccttttttagccttctgtcttgtcaccaaccattcctacttggtggccatgtacttggaaaaaggccgcatgacctttctggctccactcagtgtctaaggcaccctgcttcctttgcttgcatcccacagactatttccctcatcctatttactgcagcaaatctctccttagttgatgagattgtgtttatctccctttaaaaccctgcctatcctgaatggtttgtcattgtctgcctttaaaatccttcctctttcttcctcctctgttctctaaataatgatggggctaagttatacccaaagctcactttacaaaatatttcctcagtactttgcagaaaacaccaaacaaaaatgccattttaaaagaggtatattttttcttttagaatgtaagctcctcaagagcagggacaatgttttctgtatgttctgttgtgcctagtacactgtaaatgctcaataaatattgatgatgggaggca

SEQ ID NO: 6158 - DNA, 773 bp, Homo sapiens
gatgacatggcagcctgcatgaagtctgtaactgagcaaggagctgaattatccaatgaggagaggaatcttctctcagttgcttataaaaatgttttaggagcccgtaggtcatcttggagggtcgtctcaagtattgaacaaaagacggaaggtgctgagaaaaaacagcagatggctcgagaatacagagagaaagttgatacggagctaagagatatctgcaatgatgtactgtttcttttggaaaagttcttgatccccagtgcttcacaagcagagagcaaagtcttctctttgaaaatgaaaggagattactaccattacttggcagaggttgccactggtgatgacaagaaagggattgtggatcagtcacaacaagcataccaagaagcttttgaaatcagcaaaaaggaaatgcaaccaacacatcctatcagaccaggtctggcccttaacttctctgtgttctattatgagattctgaactccccagagaaagcctgctctcttgcaaagacagcttttgatgaagccattgctgaacttgatacattaattgaagagtcatacaaagacagcatgctaataatgcaattactgagagacaacttgacaatgtggttttcatgtttaatattaggggagtagagccagttaacatttagggagttacctgttttcatcttgaggtggccaatatggggatgtggaatttttatacaagttataaatgtttggcatagtacttttggtacattgtggcttca

SEQ ID NO: 6159 - DNA, 1845 bp, Homo sapiens
agctgacacaaccaagacgagtctcagtgtctagggaagcttggggttctgctccttttacttcaggcgaacctgaactttaatgcaattttgaagcatgccctgaatagattcagtcattatcaagtcaaactaaaaacggtgaaaggttgcgactattaccaaatagaagacaatgagaagtcataccataacaatgacgacaacttcagtcagcagctggccttactcctcccacagaatgcgctttataaccaatcatagcgaccaaccgccacaaaacttctcagcaacaccaaatgttactacctgtcccatggatgaaaaattgctatctactgtgttaaccacatcctactctgttattttcatcgtgggactggttgggaacataatcgccctctatgtatttctgggtattcaccgtaaaagaaattccattcaaatttatctacttaacgtagccattgcagacctcctactcatcttctgcctccctttccgaataatgtatcatattaaccaaaacaagtggacactaggtgtgattctgtgcaaggttgtgggaacactgttttatatgaacatgtacattagcattattttgcttggattcatcagtttggatcgctatataaaaattaatcggtctatacagcaacggaaggcaataacaaccaaacaaagtatttatgtctgttgtatagtatggatgcttgctcttggtggattcctaactatgattattttaacacttaagaaaggagggcataattccacaatgtgtttccattacagagataagcataacgcaaaaggagaagccatttttaacttcattcttgtggtaatgttctggctaattttcttactaataatcctttcatatattaagattgggaagaatctattgaggatttctaaaaggaggtcaaaatttcctaattctggtaaatatgccactacagctcgtaactcctttattgtacttatcatttttactatatgttttgttccctatcatgcctttcgattcatctacatttcttcacagctaaatgtatcatcttgctactggaaagaaattgttcacaaaaccaatgagatcatgctggttctctcatctttcaatagttgcttagatccagtcatgtatttcctgatgtccagtaacattcgcaaaataatgtgccaacttctttttagacgatttcaaggtgaaccaagtaggagtgaaagcacttcagaatttaaaccaggatactccctgcatgatacatctgtggcagtgaaaatacagtctagttctaaaagtacttgaggtaaacatactaaaatgaattatataatgcagcctcttaattctttgaagaactaaaaaattaggaaacaagttctagcatttacaaaactcagatctcaaagctctgcttgtatttgtgatatttcatttgcttaactgtaaaccatttcaaggtactatcttttaaatctgtatgtaaaatcttttcaaaatacatttttaagctaatactcttaacatagattatgaagttaagtgaaatttatggctctaacagcaaaataattaaagtgccatagtttctcaagtgactaaagtagttattaaaatcaagcacttgatactaatttgaagtgtgtttaaaagtaaatgatttgggaactgacaatgtgtcagaaaatatatgttcatttatcattttaaaatcttgtataatttgccactgtattcatttatgcctaaatctctataacagatgaaaagataattaataaaatcctaattaaaaaataaaaaaaaaaaaaaaaaaaaaaaaaaaaaaa

SEQ ID NO: 6160 - protein, 381 aa, Homo sapiens
MRSHTITMTTTSVSSWPYSSHRMRFITNHSDQPPQNFSATPNVTTCPMDEKLLSTVLTTSYSVIFIVGLVGNIIALYVFLGIHRKRNSIQIYLLNVAIADLLLIFCLPFRIMYHINQNKWTLGVILCKVVGTLFYMNMYISIILLGFISLDRYIKINRSIQQRKAITTKQSIYVCCIVWMLALGGFLTMIILTLKKGGHNSTMCFHYRDKHNAKGEAIFNFILVVMFWLIFLLIILSYIKIGKNLLRISKRRSKFPNSGKYATTARNSFIVLIIFTICFVPYHAFRFIYISSQLNVSSCYWKEIVHKTNEIMLVLSSFNSCLDPVMYFLMSSNIRKIMCQLLFRRFQGEPSRSESTSEFKPGYSLHDTSVAVKIQSSSKST

SEQ ID NO: 6161 - DNA, 1020 bp, Homo sapiens
tttccgcgctacctacagaggggtccatatggcgttgttctggattcccatcgtaacttaaagggaaactttcacaatgtccggagcccttgatgtcctgcaaatgaaggaggaggatgtccttaagttccatgcagcaggaacccacttaggcggcaccaatcttgacttccagatggaacagtacatctataaaaggaaaagtgatggcatctatatcataaatctgaagaggacctgggagaagtttctgctggcagctcgtgctgttgttgccattgaaaaccctgctgatgtcagtgttatatcctccgggaatactggccagagggctgtgctgaagtttgctgctgccactggagccactccaattgctggccacttcactcctggaaccttcactaaccagatccaggcagccttccgggagccacggcttcttgtggttactgaccccagggctgaccaccagcctctcacggagtcatcttatgttaacctacctaccattgctctgtgtaacacagattctcctctgcgctatgtggacattgcaacaacaagggagctcactcagtgggtttgatgtggtggatgctggctcgggaagttctgcgcatgcgtggcaccatttcccgtggacacccatgggaggtcatgcctgatctctacttctacagagatcctgaagagattgaaaaagaagagcaggctgctgctgaaaaggcagtgaccaaggaggaatttcagggtgaatggactgctcctgctcctgagttcactgccactcagcctgaggttgcagacttgtctgaaggtgtacaggtgccctctgtgcctattcagcagttccctactgacgactggagcactcagcctgccacggaaaactggtctgcagctcccactgctcaggccactgaatgggtaggagcaaccactgactggtcttaagctgttcttgcataggctcttaagcaacatggaaaaatggttgatggaaaataaacatcagtttct

SEQ ID NO: 6162 - protein, 169 aa, Homo sapiens
MSGALDVLQMKEEDVLKFHAAGTHLGGTNLDFQMEQYIYKRKSDGIYIINLKRTWEKFLLAARAVVAIENPADVSVISSGNTGQRAVLKFAAATGATPIAGHFTPGTFTNQIQAAFREPRLLVVTDPRADHQPLTESSYVNLPTIALCNTDSPLRYVDIATTRELTQWV

SEQ ID NO: 6163 - DNA, 1416 bp, Homo sapiens
ctgcagagacttcccaggaaggtccagcgccctctcagccttcgtactcagaacagccgatgatgggcctcagtaacctgagccccggtcctggccccagccaggccgtgcctctcccagaggggctgctccgccagcggtacagagaggagaagaccctggaagagcggcggtgggagaggctggagttccttcagaggaagaaagcattcctgcggcatgtgaggaggagacaccgcgatcacatggccccctatgctgttgggagggaagccagaatctccccattaggtgacagaagtcagaatcgattccgatgtgaatgtcgatactgccagagccacaggccgaatctttctgggatccctggggagagtaacagggccccacatccctcctcctgggagacgctggtgcagggcctcagtggcttgactctcagcctaggcaccaaccagcccgggcctctgcctgaagcggcactccagccacaggagacagaggagaagcgccagcgagagaggcagcaggagagcaaaataatgtttcagaggctgctcaagcagtggttagaggaaaactgagacgtgcacccccatgggatggagacccgaagggactcagacggagccgccgtgttggcagcgcctgggtgtgggcccattttggggaccaaacagcaagctgtggtcggatgagtgccaggacctgtgtaccgggacacgtgggagtcctcccagcatgatgcttgactgacccgaggaaggtcctcatgtttcgtgcctgtcattctcggatggctgtgaggcattccttggcaagggacgctgcgtaccagcggtcctcaccgcatctcacatggctcctgtgatgcatgttgtcgctttcccacccgggatctccatctctcttcccttcctgctgtcagtaagagatcacatgtctgtgtagtgtgaatgccttgtcgctgtcctgtgcttttgcaccattgagttgactgcctctgagaagcagcactaggcctgttgaaatgcaatgtgctgccctgagatccagtttcaagaatgggcaggtaaacgcagtgtgggaaaggaatgtggaatgagaacttggtggttcaccgctgtactatttgtgtaaatgtttacgtatgtgataagctacatgtatgtaaatgttgcaatacccctaacagtcgagtagtagtctcccttacaggaatttttgacggggttcctcatcatcaataccaaataaatatatgtaggaatggaaaaaaaaaaaaaaaaaaaaaaaaaaaaaaaaaaaaaaaaaaaaaaaaaaaaaaaaaaaaaaaaaaaaaaaaaaaaaaaaaaaaaaaaaaaaaaaaaaaaaaaaaaaaaaaaaaaaaaaaaaaaaaaaaaaaaaaaaaaaaaa

SEQ ID NO: 6164 - protein, 174 aa, Homo sapiens
MMGLSNLSPGPGPSQAVPLPEGLLRQRYREEKTLEERRWERLEFLQRKKAFLRHVRRRHRDHMAPYAVGREARISPLGDRSQNRFRCECRYCQSHRPNLSGIPGESNRAPHPSSWETLVQGLSGLTLSLGTNQPGPLPEAALQPQETEEKRQRERQQESKIMFQRLLKQWLEEN

SEQ ID NO: 6165 - DNA, 3423 bp, Homo sapiens
ggcacgagggtggtcggagcgccgactcccttctcgtcgtcgccattttgagctggtgactgtggccggctgggagtaggcggcagtgagtttccctgggagggcagcgcgcttggcgcttctcccctccccccgatctgcctccagtctcggacttggttgttgcgcgctccggctccggctgagctgggagagttggaggaggtggcggcgggcagaggtgatgtctgggagcccttccttgacagcccgggccgagaagagtccctgcaggaagcatcacccaggctggcagatcatggtagcagcagcgggggtggctgggaagtgaaacggagccagcggctgaggaggggccccagcagcccccgaaggccctatcaggacatggagtatgaaagacgtggtggtcgtggtgacaggactggccgctatggagccactgaccgctcgcaggatgatggtggggagaaccgcagccgagaccacgactaccgggacatggactaccgttcatatcctcgcgagtatggcagccaggagggcaagcatgactatgacgactcatctgaggagcagagtgcggaggattcctacgaggcctccccgggctccgagactcagcgtaggcggcggcggcggcacaggcacagccccaccggcccgccaggcttcccccgagacggcgactatcgggaccaggactatcggaccgagcaaggggaggaggaggaggaggaggaggatgaggaggaggaggagaaggccagtaacatcgtcatgctgaggatgctgccacaggcagccactgaggatgacatccgtggccagctgcagtcgcacggcgtgcaagcacgggaggttcggctgatgcggaacaaatcttcaggtcagagccggggcttcgccttcgtcgagtttagtcacttgcaggacgctacacgatggatggaagccaatcagcactccctcaacatcctgggccagaaggtgtcgatgcactacagtgaccccaagcccaagatcaatgaggactggctgtgcaataagtgtggcgtccagaacttcaaacgccgagagaagtgcttcaaatgtggcgtgcccaagtcagaggcagagcagaagctgcccctcggcacgaggctggatcagcagacactgccactgggtggccgggagctgagccagggcctgcttcccctgccgcagccctaccaggcccagggagtcctggcctcccaagccctgtcacagggctcggagccaagctcagagaacgccaatgacaccatcattttgcgcaacctgaacccacacagcaccatggattccatcctgggggccctggcaccctacgcggtgctgtcctcctccaacgtgcgcgtcataaaggacaagcagacccaactgaaccgcggctttgccttcatccagctctccaccatcgtggaggcagcccagctgctgcagatcctgcaggccctgcacccaccactcactatcgacggcaagaccatcaatgttgagtttgccaagggttctaagagggacatggcctccaatgaaggcagtcgcatcagtgctgcctctgtggccagcactgccattgctgcggcccagtgggccatctcacaggcctcccaaggtggggagggtacctgggccacctccgaggagccgccggtcgactacagctactaccaacaggatgagggctatggcaacagccagggcacagagtcttccctctatgcccatggctacctcaagggcaccaagggccctggcatcactggaaccaaaggggatcccactggagcaggtcccgaggcctccctagagcctggggccgactctgtgtcgatgcaggctttctctcgcgcccagcctggtgctgctcctggcatctaccaacaatcagccgaggcgagcagtagccagggcactgctgccaacagccagtcgtataccatcatgtcacccgctgtgctcaaatctgagctccagagccctacccatcctagttctgctctcccaccggctaccagccccactgcccaggaatcctacagccagtaccctgttcccgacgtctctacctaccagtacgatgagacctccggctactactatgacccccagaccggcctctactatgaccccaactcccagtattactacaatgctcagagccagcagtacctgtactgggatggggagaggcggacctatgttcccgccctggagcagtcggccgacggacataaggagacaggggcaccctcgaaggagggcaaagagaagaaggagaagcacaagaccaagacagctcaacagattgccaaggacatggaacgctgggcccgcagtctcaacaaacaaaaagaaaacttcaaaaatagcttccagcctatcagctccctgcgagatgacgagaggcgggagtcagccactgcagatgctggctatgccatcctcgagaagaagggagcactagccgagagacagcacaccagcatggatctcccgaaattggccagtgacgaccgcccaagccctccgcgaggactggtggcagcctacagcggggagagtgacagtgaggaggagcaggagcgtgggggccctgagcgggaggagaagctcaccgactggcagaagctggcctgtctgctctgccgacgccagttccccagcaaagaggcgctcatccggcaccagcagctctcagggctccacaagcaaaaccttgagattcaccggcgagcccacttgtcagaaaacgagctagaagcactagagaagaatgacatggagcaaatgaagtaccgggaccgtgcagctgaacgcagagaaaagtatggcatccccgagccgccagagcccaagaggaggaagtacggcggcatatccacagcctctgtagacttcgagcagcctactcgggacgggctgggcagtgacaacattggcagtcggatgctgcaggccatgggctggaaagagggcagcggcctgggccgcaagaagcagggcattgtaacgcctatcgaggcccaaacacgggtgcggggctccggcctgggtgcacggggcagctcctacggggtcacctcaaccgagtcctacaaggagacactgcacaagacaatggtgacccgcttcaacgaggcccagtgagcagcttcaagagcaacttctccacatgttgggtgtccatcctggggcagggaaggacagagtgttggatggctgggacggggccttgctcttgtcggccagcccactccccagccagagagggcttgaccaaatcaaattgaggtggtgacttttgttggaaaattgggctgggatcacgtcctgttttgtaataaaagctgaaaagtctgaaaaaaaaaaaaaaaaaaaaaaaaaaaaaaa

SEQ ID NO: 6166 - protein, 930 aa, Homo sapiens
MEYERRGGRGDRTGRYGATDRSQDDGGENRSRDHDYRDMDYRSYPREYGSQEGKHDYDDSSEEQSAEDSYEASPGSETQRRRRRRHRHSPTGPPGFPRDGDYRDQDYRTEQGEEEEEEEDEEEEEKASNIVMLRMLPQAATEDDIRGQLQSHGVQAREVRLMRNKSSGQSRGFAFVEFSHLQDATRWMEANQHSLNILGQKVSMHYSDPKPKINEDWLCNKCGVQNFKRREKCFKCGVPKSEAEQKLPLGTRLDQQTLPLGGRELSQGLLPLPQPYQAQGVLASQALSQGSEPSSENANDTIILRNLNPHSTMDSILGALAPYAVLSSSNVRVIKDKQTQLNRGFAFIQLSTIVEAAQLLQILQALHPPLTIDGKTINVEFAKGSKRDMASNEGSRISAASVASTAIAAAQWAISQASQGGEGTWATSEEPPVDYSYYQQDEGYGNSQGTESSLYAHGYLKGTKGPGITGTKGDPTGAGPEASLEPGADSVSMQAFSRAQPGAAPGIYQQSAEASSSQGTAANSQSYTIMSPAVLKSELQSPTHPSSALPPATSPTAQESYSQYPVPDVSTYQYDETSGYYYDPQTGLYYDPNSQYYYNAQSQQYLYWDGERRTYVPALEQSADGHKETGAPSKEGKEKKEKHKTKTAQQIAKDMERWARSLNKQKENFKNSFQPISSLRDDERRESATADAGYAILEKKGALAERQHTSMDLPKLASDDRPSPPRGLVAAYSGESDSEEEQERGGPEREEKLTDWQKLACLLCRRQFPSKEALIRHQQLSGLHKQNLEIHRRAHLSENELEALEKNDMEQMKYRDRAAERREKYGIPEPPEPKRRKYGGISTASVDFEQPTRDGLGSDNIGSRMLQAMGWKEGSGLGRKKQGIVTPIEAQTRVRGSGLGARGSSYGVTSTESYKETLHKTMVTRFNEAQ

SEQ ID NO: 6167 - DNA, 3419 bp, Homo sapiens
tggcggcggcgcgacccggggaaccggcattgatgtccagctcgccgctgtccaagaaacgtcgcgtgtccgggcctgatccaaagccgggttctaactgctcccctgcccagtccgtgttgtccgaagtgccctcggtgccaaccaacggaatggccaagaacggcagtgaagcagacatagacgagggcctttactcccggcagctgtatgtgttgggccatgaggcaatgaagcggctccagacatccagtgtcctggtatcaggcctgcggggcctgggcgtggagatcgctaagaacatcatccttggtggggtcaaggctgttaccctacatgaccagggcactgcccagtgggctgatctttcctcccagttctacctgcgggaggaggacatcggtaaaaaccgggccgaggtatcacagccccgcctcgctgagctcaacagctatgtgcctgtcactgcctacactggacccctcgttgaggacttccttagtggtttccaggtggtggtgctcaccaacacccccctggaggaccagctgcgagtgggtgagttctgtcacaaccgtggcatcaagctggtggtggcaggcacgcggggcctgtttgggcagctcttctgtgactttggagaggaaatgatcctcacagattccaatggggagcagccactcagtgctatggtttctatggttaccaaggacaaccccggtgtggttacctgcctggatgaggcccgacacgggtttgagagcggggactttgtctccttttcagaagtacagggcatggttgaactcaacggaaatcagcccatggagatcaaagtcctgggtccttatacctttagcatctgtgacacctccaacttctccgactacatccgtggaggcatcgtcagtcaggtcaaagtacctaagaagattagctttaaatccttggtggcctcactggcagaacctgactttgtggtgacggacttcgccaagttttctcgccctgcccagctgcacattggcttccaggccctgcaccagttctgtgctcagcatggccggccacctcggccccgcaatgaggaggatgcagcagaactggtagccttagcacaggctgtgaatgctcgagccctgccagcagtgcagcaaaataacctggacgaggacctcatccggaagctggcatatgtggctgctggggatctggcacccataaacgccttcattgggggcctggctgcccaggaagtcatgaaggcctgctccgggaagttcatgcccatcatgcagtggctatactttgatgcccttgagtgtctccctcaggacaaagaggtcctcacagaggacaagtgcctccagcgccagaaccgttatgacgggcaagtggctgtgtttggctcagacctgcaagagaagctgggcaagcagaagtatttcctggtgggtgcgggggccattggctgtgagctgctcaagaactttgccatgattgggctgggctgcggggagggtggagaaatcatcgttacagacatggacaccattgagaagtcaaatctgaatcgacagtttcttttccggccctgggatgtcacgaagttaaagtctgacacggctgctgcagctgtgcgccaaatgaatccacatatccgggtgacaagccaccagaaccgtgtgggtcctgacacggagcgcatctatgatgacgattttttccaaaacctagatggcgtggccaatgccctggacaacgtggatgcccgcatgtacatggaccgccgctgtgtctactaccggaagccactgctggagtcaggcacactgggcaccaaaggcaatgtgcaggtggtgatccccttcctgacagagtcgtacagttccagccaggacccacctgagaagtccatccccatctgtaccctgaagaacttccctaatgccatcgagcacaccctgcagtgggctcgggatgagtttgaaggcctcttcaagcagccagcagaaaatgtcaaccagtacctcacagaccccaagtttgtggagcgaacactgcggctggcaggcactcagcccttggaggtgctggaggctgtgcagcgcagcctggtgctgcagcgaccacagacctgggctgactgcgtgacctgggcctgccaccactggcacacccagtactcgaacaacatccggcagctgctgcacaacttccctcctgaccagctcacaagctcaggagcgccgttctggtctgggcccaaacgctgtccacacccgctcacctttgatgtcaacaatcccctgcatctggactatgtgatggctgctgccaacctgtttgcccagacctacgggctgacaggctctcaggaccgagctgctgtggccacattcctgcagtctgtgcaggtccccgaattcacccccaagtctggcgtcaagatccatgtttctgaccaggagctgcagagcgccaatgcctctgttgatgacagtcgtctagaggagctcaaagccactctgcccagcccagacaagctccctggattcaagatgtaccccattgactttgagaaggatgatgacagcaactttcatatggatttcatcgtggctgcatccaacctccgggcagaaaactatgacattccttctgcagaccggcacaagagcaagctgattgcagggaagatcatcccagccattgccacgaccacagcagccgtggttggccttgtgtgtctggagctgtacaaggttgtgcaggggcaccgacagcttgactcctacaagaatggtttcctcaacttggccctgcctttctttggtttctctgaaccccttgccgcaccacgtcaccagtactataaccaagagtggacattgtgggatcgctttgaggtacaagggctgcagcctaatggtgaggagatgaccctcaaacagttcctcgactattttaagacagagcacaaattagagatcaccatgctgtcccagggcgtgtccatgctctattccttcttcatgccagctgccaagctcaaggaacggttggatcagccgatgacagagattgtgagccgtgtgtcgaagcgaaagctgggccgccacgtgcgggcgctggtgcttgagctgtgctgtaacgacgagagcggcgaggatgtcgaggttccctatgtccgatacaccatccgctgaccccgtctgctcctctaggctggccccttgtccacccctctccacaccccttccagcccagggttcccatttggcttctggcagtggcccaactagccaagtctggtgttccctcatcatccccctacctgaacccctcttgccactgccttctaccttgtttgaaacctgaatcctaataaagaattaataactcccaaaaaaaaaaaa

SEQ ID NO: 6168 - protein, 1058 aa, Homo sapiens
MSSSPLSKKRRVSGPDPKPGSNCSPAQSVLSEVPSVPTNGMAKNGSEADIDEGLYSRQLYVLGHEAMKRLQTSSVLVSGLRGLGVEIAKNIILGGVKAVTLHDQGTAQWADLSSQFYLREEDIGKNRAEVSQPRLAELNSYVPVTAYTGPLVEDFLSGFQVVVLTNTPLEDQLRVGEFCHNRGIKLVVAGTRGLFGQLFCDFGEEMILTDSNGEQPLSAMVSMVTKDNPGVVTCLDEARHGFESGDFVSFSEVQGMVELNGNQPMEIKVLGPYTFSICDTSNFSDYIRGGIVSQVKVPKKISFKSLVASLAEPDFVVTDFAKFSRPAQLHIGFQALHQFCAQHGRPPRPRNEEDAAELVALAQAVNARALPAVQQNNLDEDLIRKLAYVAAGDLAPINAFIGGLAAQEVMKACSGKFMPIMQWLYFDALECLPQDKEVLTEDKCLQRQNRYDGQVAVFGSDLQEKLGKQKYFLVGAGAIGCELLKNFAMIGLGCGEGGEIIVTDMDTIEKSNLNRQFLFRPWDVTKLKSDTAAAAVRQMNPHIRVTSHQNRVGPDTERIYDDDFFQNLDGVANALDNVDARMYMDRRCVYYRKPLLESGTLGTKGNVQVVIPFLTESYSSSQDPPEKSIPICTLKNFPNAIEHTLQWARDEFEGLFKQPAENVNQYLTDPKFVERTLRLAGTQPLEVLEAVQRSLVLQRPQTWADCVTWACHHWHTQYSNNIRQLLHNFPPDQLTSSGAPFWSGPKRCPHPLTFDVNNPLHLDYVMAAANLFAQTYGLTGSQDRAAVATFLQSVQVPEFTPKSGVKIHVSDQELQSANASVDDSRLEELKATLPSPDKLPGFKMYPIDFEKDDDSNFHMDFIVAASNLRAENYDIPSADRHKSKLIAGKIIPAIATTTAAVVGLVCLELYKVVQGHRQLDSYKNGFLNLALPFFGFSEPLAAPRHQYYNQEWTLWDRFEVQGLQPNGEEMTLKQFLDYFKTEHKLEITMLSQGVSMLYSFFMPAAKLKERLDQPMTEIVSRVSKRKLGRHVRALVLELCCNDESGEDVEVPYVRYTIR

SEQ ID NO: 6169 - DNA, 3138 bp, Homo sapiens
cagctgctgctgcggcggctgtggcggcggcagcggcggtgactgaggatagagagccacagcacgaggagctgccaggcctggacagccagtggcgccagatagaaaacggcgagagtgggcgagaacgtccactgcgggccggcgaaagctggttccttgtggagaagcactggtataagcagtgggaggcatacgtgcagggaggggaccaggactccagcaccttccctggctgcatcaacaatgccacactctttcaagatgagataaactggcgcctcaaggagggactggtggaaggcgaggattatgtgctgctcccagcagctgcttggcattacctggtcagctggtatggtctagagcatggccagccacccattgaacgcaaggtcatagagctgcccaacatccagaaggtcgaagtgtacccagtagaactgctgcttgtccggcacaatgatttgggcaaatctcacactgttcagttcagccataccgattctattggcctagtattgcgcacagctcgggagcggtttctggtggagccccaggaagacactcggctttgggccaagaactcagaaggctctttggataggttgtatgacacacacatcacggttctcgatgcggcccttgagactgggcagttgatcatcatggagacccgcaagaaagatggcacttggcccagcgcacagctgcatgtcatgaacaacaacatgtcggaagaggatgaggacttcaagggtcagccaggcatctgtggcctcaccaatctgggcaacacgtgcttcatgaactcggccctgcagtgcctcagcaatgtgccacagctcaccgagtacttcctcaacaactgctacctggaggagctcaacttccgcaacccactgggcatgaagggtgagatcgcagaggcctatgcagacctggtgaagcaggcgtggtctggccaccaccgctccattgtgccacatgtgttcaagaacaaggttggccattttgcatcccaatttctgggctaccagcagcatgactctcaggagctgctgtcattcctcctggacgggctgcatgaggaccttaatcgggtgaagaagaaggagtatgtggagctgtgcgatgctgctgggcgaccggatcaggaggtggcacaggaggcatggcaaaaccacaaacggcggaacgattctgtgatcgtggacactttccacggcctcttcaagtccacgctggtgtgccccgattgtggcaatgtatctgtgaccttcgaccccttctgctacctcagtgttccactgcctatcagccacaagagggtcttggaggtcttctttatccccatggatccgcgccgcaagccagagcagcaccggctcgtggtccccaagaaaggcaagatctcggatctatgtgtggctctgtccaaacacacgggcatctcgccagagaggatgatggtggctgatgtcttcagtcaccgcttctataagctctatcagctagaggagcctctgagcagcatcttggaccgtgatgatatcttcgtctatgaggtgtcaggtcgcattgaggccattgagggctcaagagaggacatcgtggttcctgtctacctgcgggagcgcacccctgcccgtgactacaacaactcctactacggcctgatgctttttggacaccccctcctggtatcagtgccccgggaccgcttcacctgggagggcctgtataacgtcctgatgtaccggctctcacgctacgtgaccaaacccaactcagatgatgaggacgatggggatgagaaagaagatgacgaggaggataaagatgacgtccctgggccctcaactgggggcagcctccgagaccctgagccagagcaggctgggcccagctctggagtcacgaacaggtgcccgttcctcctggacaattgccttggcacatctcagtggcccccaaggcgacgacgcaagcagctgttcaccctgcagacggtgaactccaatgggaccagcgaccgcacaacctcccctgaagaagtccatgcccagccgtacattgctatcgactgggagccagagatgaagaagcgttactatgacgaggtagaggctgagggctacgtgaagcatgactgcgtcgggtacgtgatgaagaaggctcccgtgcggctgcaggagtgcattgagctcttcaccactgtggagaccctggagaaggaaaacccctggtactgcccttcctgcaagcagcaccagctggcaaccaagaagctggacctgtggatgctgccggagattctcatcatccacctgaaacgcttttcctacaccaagttctcccgagagaagctggacaccctcgtggagtttcctatccgggacctggacttctctgagtttgtcatccagccacagaatgagtcgaatccggagctgtacaaatatgacctcatcgcggtttccaaccattatgggggcatgcgtgatggacactacacaacatttgcctgcaacaaggacagcggccagtggcactactttgatgacaacagcgtctcccctgtcaatgagaatcagatcgagtccaaggcagcctatgtcctcttctaccaacgccaggacgtggcgcgacgcctgctgtccccggccggctcatctggcgccccagcctcccctgcctgcagctccccacccagctctgagttcatggatgttaattgagagccctgggtcctgccacagaaaaaaaaaaaaaaaagccctctctgcaatctcgcttctcgtgtccgccccgcttctcttattcgtgttaggtgcccccgccaggcattgcaggcttagtcgtggctactgttctcctgtgccgctgcatcgctctctcccgggaaagaacaggtcgtgtctcctcctagcagtgcgcgccccgcctgtgtttgcccttccagcagtgaccctcccttctagtctttatttatggtcgtgcccttccctctcctcagcccagagtgttctgcgtgggtggtgatgggggttcacctgaacacagagtgtattttcttattgaggccctgtaccttctgctgtgtgtgtgtatatataaagcaccagtctgctcccc

SEQ ID NO: 6170 - DNA, 2700 bp, Homo sapiens
tgacccaataagggtggaaggctgagtcccgcagagccaataacgagagtccgagaggcgacggaggcggactctgtgaggaaacaagaagagaggcccaagatggagacggcggcggctgtagcggcgtgacagtgaagctgagaccttggcactcaagagtgagacaagcaacaggagggcctgagcagagaaggaactggaaggacttcagatgtgagcaggatctcttggactgtcgtgtgaaaattaggctgcagggggcgacaggagcctggactttgaattttattttgtcccctgccactttgcttctagactatcattattggacctctgaattcttgtctgccttcttgtaggagccccatggcacctgcccagccccacctcagcccatcttgacaaaatctaaggctccatggagccaccacggggcccccctgccaatggggccgagccatcccgggcagtgggcaccgtcaaagtatacctgcccaacaagcaacgcacggtggtgactgtccgggatggcatgagtgtctacgactctctagacaaggccctgaaggtgcggggtctaaatcaggactgctgtgtggtctaccgactcatcaagggacgaaagacggtcactgcctgggacacagccattgctcccctggatggcgaggagctcattgtcgaggtccttgaagatgtcccgctgaccatgcacaattttgtacggaagaccttcttcagcctggcgttctgtgacttctgccttaagtttctgttccatggcttccgttgccaaacctgtggctacaagttccaccagcattgttcctccaaggtccccacagtctgtgttgacatgagtaccaaccgccaacagccctcaaggttctaccacagtgtccaggatttgtccggaggctccagacagcatgaggctccctcgaaccgccccctgaatgagttgctaaccccccagggtcccagcccccgcacccagcactgtgacccggagcacttccccttccctgccccagccaatgcccccctacagcgcatccgctccacgtccactcccaacgtccatatggtcagcaccacggcccccatggactccaacctcatccagctcactggccagagtttcagcactgatgctgccggtagtagaggaggtagtgatggaaccccccgggggagccccagcccagccagcgtgtcctcggggaggaagtccccacattccaagtcaccagcagagcagcgcgagcggaagtccttggccgatgacaagaagaaagtgaagaacctggggtaccgggactcaggctattactgggaggtaccacccagtgaggtgcagctgctgaagaggatcgggacgggctcgtttggcaccgtgtttcgagggcggtggcatggcgatgtggccgtgaaggtgctcaaggtgtcccagcccacagctgagcaggcccaggctttcaagaatgagatgcaggtgctcaggaagacgcgacatgtcaacatcttgctgtttatgggcttcatgacccggccgggatttgccatcatcacacagtggtgtgagggctccagcctctaccatcacctgcatgtggccgacacacgcttcgacatggtccagctcatcgacgtggcccggcagactgcccagggcatggactacctccatgccaagaacatcatccaccgagatctcaagtctaacaacatcttcctacatgaggggctcacggtgaagatcggtgactttggcttggccacagtgaagactcgatggagcggggcccagcccttggagcagccctcaggatctgtgctgtggatggcagctgaggtgatccgtatgcaggacccgaacccctacagcttccagtcagacgtctatgcctacggggttgtgctctacgagcttatgactggctcactgccttacagccacattggctgccgtgaccagattatctttatggtgggccgtggctatctgtccccggacctcagcaaaatctccagcaactgccccaaggccatgcggcgcctgctgtctgactgcctcaagttccagcgggaggagcggcccctcttcccccagatcctggccacaattgagctgctgcaacggtcactccccaagattgagcggagtgcctcggaaccctccttgcaccgcacccaggccgatgagttgcctgcctgcctactcagcgcagcccgccttgtgccttaggccccgcccaagccaccagggagccaatctcagccctccacgccaaggagccttgcccaccagccaatcaatgttcgtctctgccctgatgctgcctcaggatcccccattccccaccctgggagatgagggggtccccatgtgcttttccagttcttctggaattgggggacccccgccaaagactgagccccctgtctcctccatcatttggtttcctcttggctttggggatacttctaaattttgggagctcctccatctccaatggctgggatttgtggcagggattccactcagaacctctctggaatttgtgcctgatgtgccttccactggattttggggttcccagcaccccatgtggattttggggggtcccttttgtgtctcccccgccattcaaggactcctctctttcttcaccaagaagcacagaattctgctgg

SEQ ID NO: 6171 - protein, 609 aa, Homo sapiens
MEPPRGPPANGAEPSRAVGTVKVYLPNKQRTVVTVRDGMSVYDSLDKALKVRGLNQDCCVVYRLIKGRKTVTAWDTAIAPLDGEELIVEVLEDVPLTMHNFVRKTFFSLAFCDFCLKFLFHGFRCQTCGYKFHQHCSSKVPTVCVDMSTNRQQPSRFYHSVQDLSGGSRQHEAPSNRPLNELLTPQGPSPRTQHCDPEHFPFPAPANAPLQRIRSTSTPNVHMVSTTAPMDSNLIQLTGQSFSTDAAGSRGGSDGTPRGSPSPASVSSGRKSPHSKSPAEQRERKSLADDKKKVKNLGYRDSGYYWEVPPSEVQLLKRIGTGSFGTVFRGRWHGDVAVKVLKVSQPTAEQAQAFKNEMQVLRKTRHVNILLFMGFMTRPGFAIITQWCEGSSLYHHLHVADTRFDMVQLIDVARQTAQGMDYLHAKNIIHRDLKSNNIFLHEGLTVKIGDFGLATVKTRWSGAQPLEQPSGSVLWMAAEVIRMQDPNPYSFQSDVYAYGVVLYELMTGSLPYSHIGCRDQIIFMVGRGYLSPDLSKISSNCPKAMRRLLSDCLKFQREERPLFPQILATIELLQRSLPKIERSASEPSLHRTQADELPACLLSAARLVP

SEQ ID NO: 6172 - DNA, 766 bp, Homo sapiens
catcgccgcagatccagcgcccagagagacaccagagaacccaccatggccccctttgagcccctggcttctggcatcctgttgttgctgtggctgatagcccccagcagggcctgcacctgtgtcccaccccacccacagacggccttctgcaattccgacctcgtcatcagggccaagttcgtggggacaccagaagtcaaccagaccaccttataccagcgttatgagatcaagatgaccaagatgtataaagggttccaagccttaggggatgccgctgacatccggttcgtctacacccccgccatggagagtgtctgcggatacttccacaggtcccacaaccgcagcgaggagtttctcattgctggaaaactgcaggatggactcttgcacatcactacctgcagttttgtggctccctggaacagcctgagcttagctcagcgccggggcttcaccaagacctacactgttggctgtgaggaatgcacagtgtttccctgtttatccatcccctgcaaactgcagagtggcactcattgcttgtggacggaccagctcctccaaggctctgaaaagggcttccagtcccgtcaccttgcctgcctgcctcgggagccagggctgtgcacctggcagtccctgcggtcccagatagcctgaatcctgcccggagtggaagctgaagcctgcacagtgtccaccctgttcccactcccatctttcttccggacaatgaaataaagagttaccacccagc

SEQ ID NO: 6173 - DNA, 2828 bp, Homo sapiens
acattgggctcctcctcctcgggcccacgtgagctgtagggaaacgcaggggcggcttctaggtgctgccgccgccaccgccaccaccacctccaccgccgcctcggaacccaggcctggggggcggtggggccgcgtatggagcccccgccccccggagctgccaacattgccaacgccaccgccacgctacacacaggtacccctgggatggcgtgagcactcccccagcgatggacccatctgtgacgctgtggcagtttctgctgcagctgctgagagagcaaggcaatggccacatcatctcctggacttcacgggatggtggtgaattcaagctggtggatgcagaggaggtggcccggctgtgggggctacgcaagaacaagaccaacatgaattacgacaagctcagccgggccttgcggtactactatgacaagaacatcatccgcaaggtgagcggccagaagttcgtctacaagtttgtgtcctaccctgaggtcgcagggtgctccactgaggactgcccgccccagccagaggtgtctgttacctccaccatgccaaatgtggcccctgctgctatacatgccgccccaggggacactgtctctggaaagccaggcacacccaagggtgcaggaatggcaggcccaggcggtttggcacgcagcagccggaacgagtacatgcgctcgggcctctattccaccttcaccatccagtctctgcagccgcagccaccccctcatcctcggcctgctgtggtgctccccagtgcagctcctgcaggggcagcagcgcccccctcggggagcaggagcaccagtccaagccccttggaggcctgtctggaggctgaagaggccggcttgcctctgcaggtcatcctgaccccgcccgaggccccaaacctgaaatcggaagagcttaatgtggagccgggtttgggccgggctttgcccccagaagtgaaagtagaagggcccaaggaagagttggaagttgcgggggagagagggtttgtgccagaaaccaccaaggccgagccagaagtccctccacaggagggcgtgccagcccggctgcccgcggttgttatggacaccgcagggcaggcgggcggccatgcggcttccagccctgagatctcccagccgcagaagggccggaagccccgggacctagagcttccactcagcccgagcctgctaggtgggccgggacccgaacggaccccaggatcgggaagtggctccggcctccaggctccggggccggcgctgaccccatccctgcttcctacgcatacattgaccccggtgctgctgacacccagctcgctgcctcctagcattcacttctggagcaccctgagtcccattgcgccccgtagcccggccaagctctccttccagtttccatccagtggcagcgcccaggtgcacatcccttctatcagcgtggatggcctctcgacccccgtggtgctctccccagggccccagaagccatgactactaccaccaccaccaccaccccttctggggtcactccatccatgctctctccagccagccatctcaaggagaaacatagttcaactgaaagactcatgctctgattgtggtggggtggggatccttgggaagaattactcccaagagtaactctcattatctcctccacagaaaacacacagcttccacaacttctctgttttctgtcagtcccccagtggccgcccttacacgtctcctacttcaatggtaggggcggtttatttatttattttttgaaggccactgggaggagcctgacctaaccttttagggtggttaggacatctcccccacctccccacttttttccccaagacaagacaatcgaggtctggcttgagaacgacctttctttctttatttctcagcctgcccttggggagatgagggagccctgtctgcgtttttggatgtgagtagaagagttagtttgttttgttttattattcctggccatactcaggggtccaggaagaatttgtaccatttaatgggttgggagtcttggccaaggaagaatcacacccttggaatagaaatttccacctccccaacctttctctcagacagcttatccttttcaaccaactttttggccagggaggaatgtcccttttgttcttccccctgagaagccattcctttgtctgccaacctccctggggtcctgcctgtttcctcccaatggagggtttttttggggggtggtccccgtctggggggcccctccagccagtactccaggtctccctgtctctcccccgctgccattttgatagtataatctatttttaaatggggcttttcaataggggagagggagtcatctcttcctatatttggtggggtgggtgggaaggaagggatttgggggggaatcttcctgccgcctcccccactccaagtgtttatttttgataccaaacatgaattttcagttccctccctcccagccccccaatttcctgcgggcgggtacaaaggaccctttcaatgtccctggagttgggagggaggaatgggggacataaagcctgtcctgtctctattctaggcaagagagagtgggttcaaaagactcctgggctcacctgttagcgctggcccagcccaggccttgggacctgggggttggtgatttgggggacagtgctacactcgtctccactgtttgttttacttccccaaaatggaccttttttttttctaaagagtcccagagaatggggaattgttcctgtaaatatatatttttcaaagtga

SEQ ID NO: 6174 - DNA, 574 bp, Homo sapiens
cggaagccgcggttcctaccaaccgttcttattgctggcggcctgaggagcccatcatggcgacgccccctaagcggcgggcggtggaggccacgggggagaaagtgctgcgctacgagaccttcatcagtgacgtgctgcagcgggacttgcgaaaggtgctggaccatcgagacaaggtatatgagcagctggccaaataccttcaactgagaaatgtcattgagcgactccaggaagctaagcactcggagttatatatgcaggtggatttgggctgtaacttcttcgttgacacagtggtcccagatacttcacgcatctatgtggccctgggatatggttttttcctggagttgacactggcagaagctctcaagttcattgatcgtaagagctctctcctcacagagctcagcaacagcctcaccaaggactccatgaatatcaaagcccatatccacatgttgctagaggggcttagagaactacaaggcctgcagaatttcccagagaagcctcaccattgacttcttccccccatcctcagacattaaagagcctgaatgccttt

SEQ ID NO: 6175 - protein, 157 aa, Homo sapiens
MATPPKRRAVEATGEKVLRYETFISDVLQRDLRKVLDHRDKVYEQLAKYLQLRNVIERLQEAKHSELYMQVDLGCNFFVDTVVPDTSRIYVALGYGFFLELTLAEALKFIDRKSSLLTELSNSLTKDSMNIKAHIHMLLEGLRELQGLQNFPEKPHH

SEQ ID NO: 6176 - DNA, 2654 bp, Homo sapiens
gcctggaatagcctggctactacccctgcacctgttcccctgctgtccccaggcctctctgcctgaatctgcctctctctgcctcttttctcctgtccctccaggagtctctctgcctcaaccactctctctgccccttcatctctctgagctggtgtgtctggtcctaccctctgtttggggagctgtctggctctgtcccccacctcttggccagcctgtgtctcctgtctatgactgagcccaattgcctgttgcctttctgcaggtgtttccacgagcctatccctacccacctgtttgtttctgagtctgcctgtgtgtccctttctccctgtctctgcctgtcttccaagctcccctagcatcccctcctcccgcccatctgtctttctgtcccttctgtggtctgtctgttcctgtgctgtttctcatgcctgctttctttgtaacttcagttctcctactctctctctgtctcctctctgcacctttttctgccatccatcccatcctgctgtccgtctgctctgtgagtccatcccctctgtctgcctgtcactctctctagctgtgggtctacaccctcaatctttcaggccatttcccccaccatcaacacacaaacaaaccgctgtctccctccaagtgggtccagatagggggcgccccttctccacctcttcccccgcccagggccagaaggagggaaacgaaattaaaattaacatttcttctcaggaaaaaaaaaaaagtaccgctccagagcaggagcctaggcagccgagagggtgcccgaacctgagtctgagttgcggccacttcaggagctgagaggagcaggatggaactgcaggatccaaagatgaatggagccctcccttcggatgctgtgggctacaggcaagaacgtgagggcttcctgcccagtcgtggtcctgctcctgggagcaagccggtccagttcatggatttcgaggggaagacatcgtttggaatgtcagtgttcaacctcagcaacgccatcatgggcagcggcatcctggggctggcctatgccatggcccacacgggggtcatcttcttcctggccctgctgctgtgcattgcgcttctgtcgtcctactccatccacctcctgctgacctgtgctggtattgcaggcatccgagcctatgagcagctgggacagagggcattcgggcctgcggggaaggtagtggtggccacagtcatctgtctgcacaatgttggggccatgtccagttacctgttcatcatcaaatctgagctccccctggttatcggcaccttcctgtacatggaccccgagggggactggttcttgaagggaaacctcctcatcatcatcgtcagtgtgttaatcatcctgcccctcgccctcatgaaacacttgggctacctggggtacaccagtggtctctctctgacctgcatgctgtttttccttgtttcggtcatctacaagaagttccaacttggctgtgctataggccacaatgaaacagcaatggagagtgaagctctcgtgggactccccagccaaggactcaacagcagctgtgaggcccagatgttcacagttgactcacagatgtcctacacagtgcccattatggcttttgcttttgtctgccaccctgaggtgctgcccatctatacggagctctgccggccctccaagcgcaggatgcaggccgtggccaacgtgtccattggggccatgttctgcatgtatgggctcacagcaacctttggatacctcaccttctacagcagtgtgaaggcggagatgctgcacatgtacagccagaaggacccgctcatcctctgtgtgcgcctggccgtgctgctcgcggtgaccctcactgtgccagtcgtgctgttccctatccgccgggccctgcagcagctgcttttcccaggcaaggccttcagctggccacgacatgtggccatagctctgatcctgcttgttttggtcaatgtccttgtcatctgtgtgccaaccatccgggatatctttggagttatcgggtccacctcagcccccagcctcatcttcatcctccccagcatcttctacctccgcattgtaccctctgaggtggagcctttcttatcctggcccaagatccaggccctgtgctttggagtcctgggagtcctcttcatggccgtcagtctaggctttatgtttgccaactgggccacaggccagagccgcatgtctggacactgatcaggccctgctggcccaggtccctgtgcgcatgcacatggaggggtcagggccgctccctagggtccctcctgcccaacatgtggaggtggctggttcccatgaacgtggttgtcagaggcgggggacagcagaggctgcagactggcccacttccctcctccccagggatgccaagcttggatcatggccctaatcccaaccccaaccccatgggaggaggaggaggaggaagaagaggaggaggaggaggaggaggaggaggaggaggaggaggccaggtcctggtggagcctttgcccagcccagtcctctctgcctcctcctggctgaagctgtttgtcaggattaccctcgggctaaagaggaaaaataaagatgttgagctacc

SEQ ID NO: 6177 - DNA, 2669 bp, Homo sapiens
cctgttttttgtgctcctccgagctcgctgttcgtccgggttttttacgttttaatttccaggacttgaactgccatgtcctctgaagaaggaaagctcttcgtgggagggctcaactttaacaccgacgagcaggcactggaagaccacttcagcagtttcggacctatctctgagggtgagacgggccatactcacaatgggggttggtgagagaaagtctgggatccttgcatttcaaggagtattaactgaaaagttaggacccacgcctccaaattctttttcttcctaagcctatggtgtagactaaggatgaggggaagcgtctttgggattagtgggagcgctccgttttccctacctatgccatctccttttccggccaccctttgctacttaacctttggggtactgactggtccacattgctccatcttctctccctctcacagtggtcgttgtcaaggaccgggagactcagcggtccaggggttttggtttcatcaccttcaccaacccagagcatgcttcagttgccatgagagccatgaacggagaggtggggcctcctatctgcagagggaccttgtccccatctgcggcttccttcattctttttgtttttccctctgtgtctgctcggggcagcgtggccaccaagccccgcagtgcccactcacaggagcatgactgccttttgttctagggggtggagggcagcggcagacagagcctggccgcctgggaggcgacgactggtcctgcatgaggccgagaagccacctgtggatggttgacctgccttgggcttaggtagtagagtctgcagacctgtgggcctggcccggagaggacctcgtgagtcttctgacatggactctgaagcctcaaaccaagagaggtgtctgtctagccctgatagtcgggcagcttagaggagtggggaggagaactcagcctgagttcagtcaagatgtaagtagtagcaaggggaacatggtgcattcaggtcattttgtgtgggattctatagctcctgatgaagccattctggggtaaaggagcttattctggaacatggcacccagaacctggtgcccagcaggaatttttggcctcttttgcccacttacccttgcctgctcttccctcaccattgccctgactgactgccaacccatcatccttgtgtctcccacacttagtctctggatggtcgtcagatccgtgtggatcatgcaggcaagtctgctcggggaaccagaggaggtggctttggggcccatgggcgtggtcgcagctactctagaggtggtggggaccagggctatgggagtggcaggtattatgacagtcgacctggagggtatggatatggatatggacgttccagagactataatggcagaaaccagggtggttatgaccgctactcaggaggaaattacagagacaattatgacaactgaaatgagacatgcacataatataggtgagacttggatatcggcattgagtgaacctgtttgtcacactctgtcatgaccctctcaccttttctggcaagactgctctgcatttctgctgccctcatacctcacccagccaacctaccaaacattcctagctaggccttccttgctctcaggtgcatatcagagcaagtttgctagggggtgggatctgaaaacccatctcctataatcttctactcttgtgtgggatggaggaaatgaaggtgtgtccctgttgtccaaccctcagcatcttcatcagctctaggaggtgagcatgttgtcagctgttacttcatgacatcacaattctccccctcttgctgttcccagatacacaaggaataatttctgatccaggatcgtccttccaaatggctgtatttataaaggtttttggagctgcactgaagcatcttattttatagtatatcaaccttttgtttttaaattgacctgccaaggtagctgaagaccttttagacagttccatctttttttttaaattttttctgcctatttaaagacaaattatgggacgtttgtagaacctgagtatttttctttttaccagttttttagtttgagctcttaggtttattggagctagcaataattggttctggcaagtttggccagactgacttcaaaaaattaatgtgtatccagggacattttaaaaacctgtacacagtgtttattgtggttaggaagcaatttcccaatgtacctataagaaatgtgcatcaagccagcctgaccaacatggtgaaaccccatctgtactaaacataaaaaaattagcctggcatggtggtgtacgcctgtaatcccagtgacttgggaggctgaggcaggagaatcgcttgaacccgggaggcggaggttgcagtgagctaagatcgcgccactgtactccagcctgggcaacagcgagactccatctcaaaaaaaaaggaaatgtgtatcaagaacatgattatccaggggtattttctaattcagatcatcaaactgattatatagaagagttggctttaaaatgtttgcaaatgtctttttttttttaatactggaagaaaaaatattctgttgtgtctcatacagtgcttaggatgtctttcacagagcttattaaaaagatgaaacctg

SEQ ID NO: 6178 - protein, 155 aa, Homo sapiens
MAPRTWCPAGIFGLFCPLTLACSSLTIALTDCQPIILVSPTLSLWMVVRSVWIMQASLLGEPEEVALGPMGVVAATLEVVGTRAMGVAGIMTVDLEGMDMDMDVPETIMAETRVVMTATQEEITETIMTTEMRHAHNIGETWISALSEPVCHTLS

SEQ ID NO: 6179 - DNA, 2108 bp, Homo sapiens
tcttgcctggagcctgagaaagggaggagagacagaaggaaccggcgacagtggtctcagggccgctccggggggcctcaagaaccggaggcagccccggaggtggtccccgatcccgggctatgctcttggatctgagaagggaaggcggagggcggcggggacaagatgggtggagaatgtcaagcaaggaatgctaggcgggggaggggcgttgctatggcgactggggaggggcggtgtctgttctgaatcgctgtgtgtcacccgggcgctgcccaggaagggcagggctggggtgatgaccatggtaacacccgggtgggagttcgtgacatctccggcgcggagggactcgatgtctatggcaatggtcgcctggtggaagggacggaactagatcccttcgctcgggacgctcacattccaggcccttgtcctgcaggctgccgcgggcggacacgccagaggaggaggccggggaatggccgcggtgtggcagcaagtcttagcagtggacgcgaggtacaacgcgtaccgcacaccaacgtttccacagtttcggacgcagtatatccgccggcgcagccagctgctgcgggagaatgccaaggctgggcaccccccagcgctgcgtcggcagtacctgaggcttcgggggcagctgctgggccagcgctacgggcccctctccgagccaggcagtgctcgtgcctatagcaacagcatcgtccgcagtagccgcactactcttgaccgcatggaggactttgaggatgatcctcgggccctgggggcccgtgggcaccgtcgttctgtcagcagaggctcctaccagctgcaggcgcagatgaaccgtgccgtctatgaggacaggccccctggcagcgtggtgcccacgtcagcagcagaggcaagtcgggccatggccggggacacgtcactgagcgagaactatgcctttgcgggcatgtatcatgtttttgaccagcacgtggatgaggcagtcccaagggtgcgcttcgccaatgatgaccgacaccgcctggcctgctgctcactcgacggcagcatctccctgtgccagctggtgcctgccccacccacagtgcttcgcgtgctacggggccacacccgtggtgtctccgacttcgcctggtccctctccaatgacatcctcgtgtccacctcactggatgccaccatgcgcatctgggcctctgaggatggtcgctgcatccgagagatccctgaccccgatagcgctgaactgctctgctgcaccttccagcctgtcaacaacaacctcactgtggtggggaacgccaagcacaacgtgcatgtcatgaacatctccacaggcaagaaagtgaaggggggctccagcaagctgacaggccgtgtccttgctctgtcctttgatgcccctggccggctgctctgggcgggtgatgaccgtggcagtgtcttctctttcctctttgatatggccacagggaagctgaccaaagccaagcgtttggtggtgcatgaggggagccctgtgaccagcatctcagcccggtcctgggtcagccgcgaggcccgggatccctcactgctcatcaatgcttgcctcaacaagttgctgctctacagggtggtagacaacgaggggaccctgcagctgaagagaagcttccccatcgagcagagctcacatcctgtgcgcagcatcttctgtcccctcatgtccttccgccagggggcctgcgtggtgacgggcagtgaggacatgtgcgtgcacttctttgatgtggagcgggcggccaaggctgctgtcaacaagctgcagggccacagtgcacctgtgcttgatgtcagcttcaactgcgacgagagcctactggcctccagtgacgccagcggcatggtcatcgtctggaggcgggagcagaagtagggtcctgtcggccctgctgctgtcctccatcccacccctcttactccagcctcgtgttgtaaataaagtttcggtggtcatgctgagggccggctcccagctctgccggggacggacagggcagagggcagcgggcagctccaggaacacggtgaaaaaaaaaaaa

SEQ ID NO: 6180 - protein, 485 aa, Homo sapiens
MAAVWQQVLAVDARYNAYRTPTFPQFRTQYIRRRSQLLRENAKAGHPPALRRQYLRLRGQLLGQRYGPLSEPGSARAYSNSIVRSSRTTLDRMEDFEDDPRALGARGHRRSVSRGSYQLQAQMNRAVYEDRPPGSVVPTSAAEASRAMAGDTSLSENYAFAGMYHVFDQHVDEAVPRVRFANDDRHRLACCSLDGSISLCQLVPAPPTVLRVLRGHTRGVSDFAWSLSNDILVSTSLDATMRIWASEDGRCIREIPDPDSAELLCCTFQPVNNNLTVVGNAKHNVHVMNISTGKKVKGGSSKLTGRVLALSFDAPGRLLWAGDDRGSVFSFLFDMATGKLTKAKRLVVHEGSPVTSISARSWVSREARDPSLLINACLNKLLLYRVVDNEGTLQLKRSFPIEQSSHPVRSIFCPLMSFRQGACVVTGSEDMCVHFFDVERAAKAAVNKLQGHSAPVLDVSFNCDESLLASSDASGMVIVWRREQK

SEQ ID NO: 6181 - DNA, 1113 bp, Homo sapiens
gggagaggaacagggccctggagcacctggtttcggggacagtagggttggtgggagttgcgatgatattgccacctacctcttacatcttttagtgcgtatgttctgtccacccagctactggttcatttgagtagatcggagtcagatgagtacatgtttacgggaggcgcttggttacgggatccagataggaatctttatctgagctgcttgtcagtttgttcgtctgtccctaggtctgtctgctatcagctatgccgctgcccgttgcgctgcagacccgcttggccaagagaggcatcctcaaacatctggagcctgaaccagaggaagagatcattgccgaggactatgacgatgatcctgtggactacgaggccaccaggttggagggcctaccaccaagctggtacaaggtgttcgacccttcctgcgggctcccttactactggaatgcagacacagaccttgtatcctggctctccccacatgaccccaactccgtggttaccaaatcggccaagaagctcagaagcagtaatgcagatgctgaagaaaagttggaccggagccatgacaagtcggacaggggccatgacaagtcggaccgcagccatgagaaactagacaggggccacgacaagtcagaccggggccacgacaagtctgacagggatcgagagcgtggctatgacaaggtagacagagagagagagcgagacagggaacgggatcgggaccgcgggtatgacaaggcagaccgggaagagggcaaagaacggcgccaccatcgccgggaggagctggctccctatcccaagagcaagaaggcagtaagccgaaaggatgaagagttagaccccatggaccctagctcatactcagacgccccccggggcacgtggtcaacaggactccccaagcggaatgaggccaagactggcgctgacaccacagcagctgggcccctcttccagcagcggccgtatccatccccaggggctgtgctccgggccaatgcagaggcctcccgaaccaagcagcaggattgaagcttcggcctccctggccctgggttaaaataaaagctttctggtgatcctgcccacc

SEQ ID NO: 6182 - protein, 265 aa, Homo sapiens
MPLPVALQTRLAKRGILKHLEPEPEEEIIAEDYDDDPVDYEATRLEGLPPSWYKVFDPSCGLPYYWNADTDLVSWLSPHDPNSVVTKSAKKLRSSNADAEEKLDRSHDKSDRGHDKSDRSHEKLDRGHDKSDRGHDKSDRDRERGYDKVDRERERDRERDRDRGYDKADREEGKERRHHRREELAPYPKSKKAVSRKDEELDPMDPSSYSDAPRGTWSTGLPKRNEAKTGADTTAAGPLFQQRPYPSPGAVLRANAEASRTKQQD

SEQ ID NO: 6183 - DNA, 2632 bp, Homo sapiens
ttgatgttttccagtcattccggctgacagcgttcaagttggaatcctggaggggaggtgtttttcctgtcgtacgtgggacaggccacgctgtccgtccgcagtaccgacgcctgcaggtcagagcttcggggagaaaagtgaagagcaagacggaactgacggggagaaaggctgggaaccagggtgtcgactttgactgaaatttgagacggagggcaccggagggcgagcactcgcctgtgattggcccgtgggcgtcgtcgaggtcccacgcagctgctcaattggttggtgttgcaattgttgtggcggcggcggcggcgattttgcccacgtacttccgagtaaggggcggggctgtgccctggcgcgcgtgcgcagcgccccggggccccacccggtagtgcaagaacctgcgagggggcggagcgaagaggtgcttgttttggttctgtttcctttgaagcagaaggccggaacaagcgtagcaataaacttgctggacttggagagaaggctaagacaaactcgccgcactgccttcatcttggactttacatccgggttctcctctcggcgtgacccgcgcgccgccaccgccgccgccgccgccgccgccgcctccgccgccgagggttctcgaaccggtgccgcgatccctttatccgggtctcgccgttcccgtcgtgcctcgcgcactacactagccccctcatccgggttctctcccggcgtgccccgcgccgggtttgttggggggtactcggcagtgcagccatgactatactccccaaaaagaagccgccgcctcccgacgccgaccccgccaacgagccgccgccgcccgggccgatgcccccggcgccgcggcgcggcggaggtgtgggcgtgggcggcggcggcacgggcgtgggcggcggcgatcgcgaccgtgactccggcgtcgtgggggcccgtccgcgagcttcgccaccgcctcaaggcccgctaccaggaccgccgggcgctcttcatcgctgggcgctggccgtgccgcctggtgcagtggcgggtccccggccacaacaggcttctccacctccttgcgggggcccaggtggtcccggcggcggtcccggcgacgcgctgggcgcagcggcggcgggtgtgggtgccgcgggcgtggtggtgggtgtgggtggtgccgtaggcgtgggcggctgctgctccgggcctgggcacagcaagcggcgacgtcaagctcccggggttggcgcggttggcgggggcagtcccgagcgtgaggaggtcggcgcaggctacaacagtgaggacgagtatgaggcggctgcagcacgcatcgaggctatggaccctgccactgtcgagcagcaggagcattggtttgaaaaggccctacgagacaagaagggcttcatcatcaagcagatgaaggaggatggcgcctgtctcttccgggctgtagctgaccaggtgtatggagaccaggacatgcatgaggttgtgcgaaagcattgcatggactatctgatgaagaatgccgactacttctccaactatgtcacagaggactttaccacctacattaacaggaagcggaaaaacaattgccatggcaaccacattgagatgcaggccatggcagagatgtacaaccgtcctgtggaggtgtaccagtacagcacagaacccatcaacacattccatgggatacatcaaaacgaggacgaacccattcgtgttagctaccatcggaatatccactataattcagtggtgaatcctaacaaggccaccattggtgtggggctgggcctgccatcattcaaaccagggtttgcagagcagtctctgatgaagaatgccataaaaacatcggaggagtcatggattgaacagcagatgctagaagacaagaaacgggccacagactgggaggccacaaatgaagccatcgaggagcaggtggctcgggaatcctacctgcagtggttgcgggatcaggagaaacaggctcgccaggtccgaggccccagccagccccggaaagccagcgccacatgcagttcggccacagcagcagcctccagtggcctggaggagtggactagccggtccccgcggcagcggagttcagcctcgtcacctgagcaccctgagctgcatgctgaattgggcatgaagcccccttccccaggcactgttttagctcttgccaaacctccttcgccctgtgcgccaggtacaagcagtcagttctcggcaggggccgaccgggcaacttccccccttgtgtccctctaccctgctttggagtgccgggccctcattcagcagatgtccccctctgcctttggtctgaatgactgggaagatagacaagaggcacacagagacagaccaactggcagccaggcagccccagaggagagagacattcagacagaggaaagtctccctgcccctcattccttccaagatgagaaaaacttgccgccaccccccgacactgatgccagggaggtgggaggaagaagtgggaaatttcccttcccagtacccccaagaacgtctgagccttcaatgttgaattttttctttattaaaattacttttatcttataaaatc

SEQ ID NO: 6184 - protein, 591 aa, Homo sapiens
MTILPKKKPPPPDADPGGTGVGGGDRDRDSGVVGARPRASPPPQGPLPGPPGALHRWALAVPPGAVAGPRPQQASPPPCGGPGGPGGGPGDALGAAAAGVGAAGVVVGVGGAVGVGGCCSGPGHSKRRRQAPGVGAVGGGSPEREEVGAGYNSEDEYEAAAARIEAMDPATVEQQEHWFEKALRDKKGFIIKQMKEDGACLFRAVADQVYGDQDMHEVVRKHCMDYLMKNADYFSNYVTEDFTTYINRKRKNNCHGNHIEMQAMAEMYNRPVEVYQYSTEPINTFHGIHQNEDEPIRVSYHRNIHYNSVVNPNKATIGVGLGLPSFKPGFAEQSLMKNAIKTSEESWIEQQMLEDKKRATDWEATNEAIEEQVARESYLQWLRDQEKQARQVRGPSQPRKASATCSSATAAASSGLEEWTSRSPRQRSSASSPEHPELHAELGMKPPSPGTVLALAKPPSPCAPGTSSQFSAGADRATSPLVSLYPALECRALIQQMSPSAFGLNDWEDRQEAHRDRPTGSQAAPEERDIQTEESLPAPHSFQDEKNLPPPPDTDAREVGGRSGKFPFPVPPRTSEPSMLNFFFIKITFIL

SEQ ID NO: 6185 - DNA, 945 bp, Homo sapiens
ctgggtgtacagcgtcctcgaaaccacgagcaagtgagcagatcctccgaggcaccagggactccagcccatgccatggcggattctgagcgcctctcggctcctggctgctgggccgcctgcaccaacttctcgcgcactcgaaagggaatcctcctgtttgctgagattatattatgcctggtgatcctgatctgcttcagtgcctccacaccaggctactcctccctgtcggtgattgagatgatccttgctgctattttctttgttgtctacatgtgtgacctgcacaccaagataccattcatcaactggccctggagtgatttcttccgaaccctcatagcggcaatcctctacctgatcacctccattgttgtccttgttgagagaggaaaccactccaaaatcgtcgcaggggtactgggcctaatcgctacgtgcctctttggctatgacgcctatgtcaccttccccgttcggcagccaagacatacagcagcccccactgaccccgcagatggcccggtgtaggcgaacttccctcatttctctctgcaatctgcaaataactcctccattgaaataactcctccccaccccaacaacaacattcccagcagaccaactcccaccccctctttgaggtaaaagtgcctttattgggagacttttgtcttccagcctgccaatcaaccctcctgggtgtggccaccatatgtgtgtgcctaggtcctccttctgcacgatccaataggagacaccagttctgactgaaccatgcccccacctaagtcacaaaatgagggaagtggggagttagatttcagagtccaggccctaggttgggacccactccaaataatctcctcggtgtgggtggtggttctatagagggataaatgaataataaacattgttaaaatataaaaaaaaaaaaaaaaa

SEQ ID NO: 6186 - protein, 152 aa, Homo sapiens
MADSERLSAPGCWAACTNFSRTRKGILLFAEIILCLVILICFSASTPGYSSLSVIEMILAAIFFVVYMCDLHTKIPFINWPWSDFFRTLIAAILYLITSIVVLVERGNHSKIVAGVLGLIATCLFGYDAYVTFPVRQPRHTAAPTDPADGPV

SEQ ID NO: 6187 - DNA, 2228 bp, Homo sapiens
gagcacggagcagggtttctacagctgctccccactttctcggacccggtcctggacccagcccccgactccgacacggctccaccatggaggaggcggaccgaatcctcatccattcgctgcgccaggccggcacggcagttcctccagatgtgcagaccttgcgcgccttcaccactgagctggttgtagaggctgtggtccgctgcctgcgtgtgatcaaccctgcggtgggctctggcctcagccctctgctgcctcttgccatgtctgcccggttccgcctggccatgagcctggctcaggcctgcatggacctgggctatcccttggagcttggctatcagaacttcctctaccccagtgagcctgacctccgagacctgcttctcttcttggctgagcgtctgcccaccgatgcctctgaggatgcagaccagcctgcaggtgactcagctattctcctccgggccattgggagccaaattcgggaccagctggcactgccttgggtcccgccccaccttcgcactcccaagctgcagcacctccagggctcggccctccagaagcctttccatgccagcaggctggtcgtgccagaattgagttccagaggtgagccacgggagttccaggcgagtcccctgctgcttccagtccctacccaggtgcctcagcctgttggaagggtggcctcgctcctcgaacaccatgccctgcagctctgccagcagacgggccgggaccggccaggggatgaggactgggtccaccggacatcccgcctcccaccccaggaggacacacgggctcagcggcagcggctgcaaaagcaactgactgagcatctgcgccaaagctggggcctgcttggggcccccatacaagcccgggacctgggagaactgctgcaggcctggggtgctggggccaagactggtgctcctaagggctcccgcttcacgcactcagagaagttcaccttccatctggagccccaggcccaggccactcaggtgtcagatgtgccagccacctcccggcggcctgaacaggtcacgtgggcagctcaggaacaggagctcgagtcccttcgggagcagctggaaggagtgaaccgcagcattgaggaggttgaggccgacatgaagaccctgggcgtcagctttgtgcaggcagagtctgagtgccggcacagcaagctcagtacagcagagcgtgagcaggccctgcgcctgaagagccgcgcggtggagctgctgcccgatgggactgccaaccttgccaagctgcagcttgtggtggagaatagtgcccagcgggtcatccacttggcgggtcagtgggagaagcaccgggtcccactcctcgctgagtaccgccacctccgaaagctgcaggattgcagagagctggaatcttctcgacggctggcagagatccaagaactgcaccagagtgtccgggcggctgctgaagaggcccgcaggaaggaggaggtctataagcagctgatgtcagagctggagactctgcccagagatgtgtcccggctggcctacacccagcgcatcctggagatcgtgggcaacatccggaagcagaaggaagagatcaccaagatcttgtctgatacgaaggagcttcagaaggaaatcaactccctatctgggaagctggaccggacgtttgcggtgactgatgagcttgtgttcaaggatgccaagaaggacgatgctgttcggaaggcctataagtatctagctgctctgcacgagaactgcagccagctcatccagaccatcgaggacacaggcaccatcatgcgggaggttcgagacctcgaggagcagatcgagacagagctgggcaagaagaccctcagcaacctggagaagatccgggaggactaccgagccctccgccaggagaacgctggcctcctaggccgggtccgggaggcctgaggagccgccggcagaggtctctccccagcctcaggcagggatttggggtgctggaggcagtggccaagcacatgccctagctacttcctccgctgtccagttcctcctgctgcggccttggacccagacccctgcccactgaccgcaacccttatatggggtgatagtccagcatgtggggagctcggctgcagtttattggggacggtactgtgggttgggggccttggatcccaaataaatgagtagttcctctgc

SEQ ID NO: 6188 - protein, 627 aa, Homo sapiens
MEEADRILIHSLRQAGTAVPPDVQTLRAFTTELVVEAVVRCLRVINPAVGSGLSPLLPLAMSARFRLAMSLAQACMDLGYPLELGYQNFLYPSEPDLRDLLLFLAERLPTDASEDADQPAGDSAILLRAIGSQIRDQLALPWVPPHLRTPKLQHLQGSALQKPFHASRLVVPELSSRGEPREFQASPLLLPVPTQVPQPVGRVASLLEHHALQLCQQTGRDRPGDEDWVHRTSRLPPQEDTRAQRQRLQKQLTEHLRQSWGLLGAPIQARDLGELLQAWGAGAKTGAPKGSRFTHSEKFTFHLEPQAQATQVSDVPATSRRPEQVTWAAQEQELESLREQLEGVNRSIEEVEADMKTLGVSFVQAESECRHSKLSTAEREQALRLKSRAVELLPDGTANLAKLQLVVENSAQRVIHLAGQWEKHRVPLLAEYRHLRKLQDCRELESSRRLAEIQELHQSVRAAAEEARRKEEVYKQLMSELETLPRDVSRLAYTQRILEIVGNIRKQKEEITKILSDTKELQKEINSLSGKLDRTFAVTDELVFKDAKKDDAVRKAYKYLAALHENCSQLIQTIEDTGTIMREVRDLEEQIETELGKKTLSNLEKIREDYRALRQENAGLLGRVREA

SEQ ID NO: 6189 - DNA, 4333 bp, Homo sapiens
  unsure 1234: unknown base
  unsure 1235: unknown base
  unsure 1236: unknown base
  unsure 1237: unknown base
  unsure 1238: unknown base
  unsure 1239: unknown base
  unsure 1240: unknown base
  unsure 1241: unknown base
  unsure 1242: unknown base
  unsure 1243: unknown base
  unsure 1244: unknown base
  unsure 1245: unknown base
  unsure 1246: unknown base
  unsure 1247: unknown base
  unsure 1248: unknown base
  unsure 1249: unknown base
  unsure 1250: unknown base
  unsure 1251: unknown base
  unsure 1252: unknown base
  unsure 1253: unknown base
  unsure 1254: unknown base
  unsure 1255: unknown base
  unsure 1256: unknown base
  unsure 1257: unknown base
  unsure 1258: unknown base
  unsure 1259: unknown base
  unsure 1260: unknown base
  unsure 1261: unknown base
  unsure 1262: unknown base
  unsure 1263: unknown base
  unsure 1264: unknown base
  unsure 1265: unknown base
  unsure 1266: unknown base
  unsure 1267: unknown base
  unsure 1268: unknown base
  unsure 1269: unknown base
  unsure 1270: unknown base
  unsure 1271: unknown base
  unsure 1272: unknown base
  unsure 1273: unknown base
  unsure 1274: unknown base
  unsure 1275: unknown base
  unsure 1276: unknown base
  unsure 1277: unknown base
  unsure 1278: unknown base
  unsure 1279: unknown base
  unsure 1280: unknown base
  unsure 1281: unknown base
  unsure 1282: unknown base
  unsure 1283: unknown base
  unsure 1284: unknown base
  unsure 1285: unknown base
  unsure 1286: unknown base
  unsure 1287: unknown base
  unsure 1288: unknown base
  unsure 1289: unknown base
  unsure 1290: unknown base
  unsure 1291: unknown base
  unsure 1292: unknown base
  unsure 1293: unknown base
  unsure 1294: unknown base
  unsure 1295: unknown base
  unsure 1296: unknown base
  unsure 1297: unknown base
  unsure 1298: unknown base
  unsure 1299: unknown base
  unsure 1300: unknown base
  unsure 1301: unknown base
  unsure 1302: unknown base
  unsure 1303: unknown base
  unsure 1304: unknown base
  unsure 1305: unknown base
  unsure 1306: unknown base
  unsure 1307: unknown base
  unsure 1308: unknown base
  unsure 1309: unknown base
  unsure 1310: unknown base
  unsure 1311: unknown base
  unsure 1312: unknown base
  unsure 1313: unknown base
  unsure 1314: unknown base
  unsure 1315: unknown base
  unsure 1316: unknown base
  unsure 1317: unknown base
  unsure 1318: unknown base
  unsure 1319: unknown base
  unsure 1320: unknown base
  unsure 1321: unknown base
  unsure 1322: unknown base
  unsure 1323: unknown base
  unsure 1324: unknown base
  unsure 1325: unknown base
  unsure 1326: unknown base
  unsure 1327: unknown base
  unsure 1328: unknown base
  unsure 1329: unknown base
  unsure 1330: unknown base
  unsure 1331: unknown base
  unsure 1332: unknown base
  unsure 1333: unknown base
gggctgctgtgctggcagcagtaggcgagggcgcggctgcggggttcctggtgctgaggacggacgccattggagttcccgagaagatcccgcctcccattgaatcccgccccctccccctgcagctgcttcaccctccctctcaggctgagctctcatctccctgggagcccgcagcatggctgagggaagcttcagcgtgcaatcggaaagctacagtgttgaagacatggatgagggtagcgacgaagtcggggaggaagagatggttgaaggcaacgactatgaagaattcggtgcgtttggtggctatggcaccctcaccagctttgacatccatatcctcagagccttcggaagcttgggtccaggccttcgcatcttatcgaatgagccctgggaactggaaaaccctgtgctggcccagaccctggtggaggcattgcagctggatccggaaacacttgccaatgagacggccgcccgtgctgccaacgtagcccgcgccgccgcctccaaccgtgcggctcgggccgtgtccgccgctgcccgtaccgccttcagtcaggtggtcgctagccaccgggtgccacgccgcaggtctcaggagaggatacccagcccacgacctacgccgccgaggtcaggggcccacccctgagcaccccttgcttctccgcagacctcccagatgttagtcaccagtaagatggctgcccccgaggctccggcaacctccgcacagtcccagacaggctccccggcccaggaggctgctactgagggccctagtagcgcctgtgctttctctcaggctccgtgtgccagggaggtggacgccaaccggcccagcacagccttcctgggccagaatgatgtcttcgatttcactcagccggcaggtgtcagtggcatggccttcccgcgccccaagagacctgccccagcccaagaggctgccacagagggccccagtgctgcctctggtgtgccccagacgggacctggcagggaggtggcagccacccggcccaagaccaccaagtcggggaaggcgctggccaagactcggtgggtggagcctcagaatgttgtggcagcagctgctgccaaggccaagatggccacgagcatccctgagccggagggtgcagctgctgccactgctcagcacagtgctgagccctgggccaggatgggaggcaagaggaccaagaaggtgagaggggatccnnnnnnnnnnnnnnnnnnnnnnnnnnnnnnnnnnnnnnnnnnnnnnnnnnnnnnnnnnnnnnnnnnnnnnnnnnnnnnnnnnnnnnnnnnnnnnnnnnnnccctagtctgtgggcatccctttgcttgcgtgccacggctggtccctccatagccacaggacggggtcctggctgcgtcaccctcggcagagcttgaccaaggggctacagctctatgacccctgctcagcccaggtgctttctccaactcttccccctcctgcagacatgctgaaggatgtcatcagagaatatgatgaacatttccctgagatcattgaacgagcaacgtacaccctggaaaaggtgggtgcaggatgggagcagctctgtgggggaagagcgggcatgggggtgcggtgaccctgcagcccctcaaggcccagtctctggagccatctctcacctctccgactctgagcttccactgcactggcagtttgactcgtgcttcctgccctcggcttctctctctcatgctctctgagtgtctcgccgtctggccaggtgggtctcatcgcctctgccagcgtcagctcccacagcgaaggtcttccgtgtgctgtcttcttctgccctcgctcacgagtttggattccttgctgaggagcagttctaacccggaatcactgtctgccggcaggatgccagcatggggtttggatctcacactctgttttctcccccacgtagaagtttgggatccacctgaaggagatcgacaaggaagaacacctgtatattcttgtctgcacacgggactcctcagctcgcctccttggaaagtaagaaggacactcccgaggctgatctctcttggtgatctcggcgtcatcttcatgaatggcaaccgtgccagcgaggctgtcctctgggaggcactacgcaagatgggactgcgccctgggtatgattggcctctccagctcctcccctcggtgctatcctctggccaaagaggtcctgggattgcaatagcctggtggtctggcgcaagggcgtggggtgcctgggctcggtagagagcaaaggatctcaccagggcggatggggaagcggtgctggacgctgctcagccctctctctgctctgtggccccagatgacatctaagagagacagtcagagtcagggattccatcaaatccctacctggggcgtccctgaccaacagtcctctggcctctgctgcatgcccaggcctccacagcgactccccgggggctgggaagtcatagtcatgctagggagggcccctgccaccgtctctgctcatggattcctttccttgccctcagggtgaggcacccattcctcggcgatctgaggaagctcatcacagatgactttgtgaagcagaagtaagtatcacctgagctaactgcggctctcactcgagcatcctttgtgtgctggtctggctgagaaagcagttccctatcccaaatcttcaactggagggatgggtgcctctgacctgggagtgagtggcagtggggggtatgcgagtgtgtggggaccgaaggccagggcggtcttgggaaaagggagctcacgtcacctgagaacacggtgtggggtgtgaaaacggccgccatcaccttgagcacctgccctgtagactgacacaagagttccccctggtttacacctaaggaacccggagctcagagaggagacgcctctgagcatggctcccagctggtaagggcctcagcccaactctcctgattttcaggccaggggccaccctctccccgtccctggaggacttgccaacgcacaggcgcgcatgcacaccaacaaagggtcaggacttgaggaggatgcctggagcacgcttctcctggctgactgtttcttcctctccagtcgtttcctctggtgggcctctccagggctccgccggggtgtggccaagaccctcgaggtggggtgtgctcagagcagggggcctgaagaatggctcctctgtttacaacacacccaacaggaagctggggtcatcgtgatgaggggcacaaacttgtggcctccctacagacaaatgccctacatgtggaccccctgcacctccgcatggcttccggggaggaccaatggcaaaaggctttgaaggcctcacttttgcaggcagaagtcctgggagtgggtttgggaatgagtgaagggctggaggggcaggacagtcctcttccaggagctgagctgcggcatcgggttgaggaggggccccctggaacccatccgttcagcaacaggtctgcttggctagcagcaaagtttactttcctctcatgccaaggtacctggaatacaagaagatccccaacagcaacccacctgagtatgaattcctctgggcctcgagcccgccatgagaccagcaagatgagggtcctgagattcatcgcccagaatcagaaccgagacccccgggaatggaaggctcatttcttggaggctgtggatgatgctttcaagacaatggatgtggatatggccgaggaacatgccagggcccagatgagggcccagatgaatatcggggatgaagcgctgattggacggtggagctgggatgacatacaagtcgagctcctgacctgggatgaggacggagattttggcgatgcctgggccaggatcccctttgctttctgggccagataccatcagtacattctgaatagcaaccgtgccaacaggagggccacgtggagagctggcgtcagcagtggcaccaatggaggggccagcaccagcgtcctagatggccccagcaccagctccaccatccggaccagaaatgctgccagagctggcgccagcttcttctcctggatccagcaccgttgacgaactgcagcgatcttactggccaagccagagcgcctcctctcagattccttctcgacacagcaccctaggcggcttcttcctgtcagtcggaggtggcatgcaagatgaagctctctttgctcttcctgctttcattttgtgcttttccttgtgttttcatgttttgggtatcagtgttacattaaagttgcaaaattaa

SEQ ID NO: 6190 - DNA, 990 bp, Homo sapiens
cccatcccgtgggtggccggcgacaagatggcagcagcgtgtcggagcgtgaagggcctggtggcggtaataaccggaggagcctcgggcctgggcctggccacggcggagcgacttgtggggcagggagcctctgctgtgcttctggacctgcccaactcgggtggggaggcccaagccaagaagttaggaaacaactgcgttttcgccccagccgacgtgacctctgagaaggatgtgcaaacagctctggctctagcaaaaggaaagtttggccgtgtggatgtagctgtcaactgtgcaggcatcgcggtggctagcaagacgtacaacttaaagaagggccagacccataccttggaagacttccagcgagttcttgatgtgaatctcatgggcaccttcaatgtgatccgcctggtggctggtgagatgggccagaatgaaccagaccagggaggccaacgtggggtcatcatcaacactgccagtgtggctgccttcgagggtcaggttggacaagctgcatactctgcttccaaggggggaatagtgggcatgacactgcccattgctcgggatctggctcccataggtatccgggtgatgaccattgccccaggtctgtttggcaccccactgctgaccagcctcccagagaaagtgtgcaacttcttggccagccaagtgcccttccctagccgactgggtgaccctgctgagtatgctcacctcgtacaggccatcatcgagaacccattcctcaatggagaggtcatccggctggatggggccattcgtatgcagccttgaagggagaaggcagagaaaacacacgctcctctgcccttcctttccctggggtactactctccagcttgggaggaagcccagtagccattttgtaactgcctaccagtcgccctctgtgcctaataaagtctctttttctcacaaaaaaaaaaaaaaaaaaaaaaaaaaaaaaaaaaa

SEQ ID NO: 6191 - protein, 261 aa, Homo sapiens
MAAACRSVKGLVAVITGGASGLGLATAERLVGQGASAVLLDLPNSGGEAQAKKLGNNCVFAPADVTSEKDVQTALALAKGKFGRVDVAVNCAGIAVASKTYNLKKGQTHTLEDFQRVLDVNLMGTFNVIRLVAGEMGQNEPDQGGQRGVIINTASVAAFEGQVGQAAYSASKGGIVGMTLPIARDLAPIGIRVMTIAPGLFGTPLLTSLPEKVCNFLASQVPFPSRLGDPAEYAHLVQAIIENPFLNGEVIRLDGAIRMQP

SEQ ID NO: 6192 - DNA, 5192 bp, Homo sapiens
gcctgtcctactgccgccggcgccgcggccgtcatggggttcctgaaactgattgagattgagaactttaagtcgtacaagggtcgacagattatcggaccatttcagaggttcaccgccatcattggacccaatggctctggtaagtcaaatctcatggatgccatcagctttgtgctaggtgaaaaaaccagcaacctgcgggtaaagaccctgcgggacctgatccatggagctcctgtgggcaagccagctgccaaccgggcctttgtcagcatggtctactctgaggagggtgctgaggaccgtacctttgcccgtgtcattgtaggaggttcttctgagtacaagatcaacaacaaagtggtccaactacatgagtacagtgaggaattagagaagttgggcattctcatcaaagctcgtaacttcctcgttttccagggtgctgtggaatctattgccatgaagaaccccaaagagaggacagctctatttgaagagattagtcgttctggggagctggcgcaggagtatgacaagcgaaagaaggaaatggtgaaggctgaagaggacacacagtttaattaccatcgcaagaaaaatattgcggctgaacgcaaggaagcaaagcaggagaaagaagaggctgaccggtaccagcgcctgaaggatgaggtagtacgggctcaggtacagctgcagctctttaagctttaccataatgaagtggaaattgagaagctcaacaaggaactggcctcaaagaacaaggagatcgagaaggacaagaagcgtatggacaaggtggaggatgaactgaaggagaagaagaaggagctgggcaaaatgatgcgggagcagcagcagattgagaaggagatcaaggagaaggactcagaattgaaccagaagcggcctcagtacatcaaagccaaggagaacacctcccacaaaatcaagaagctggaagcagccaagaagtctctgcagaatgctcagaagcactacaagaagcgtaaaggtgacatggatgagctggagaaggagatgctgtcagtggagaaggctcggcaggagtttgaagaacggatggaagaagagagtcagagtcagggcagagatttgacgttggaggagaatcaggtgaagaaataccaccggttgaaagaagaagccagcaagagagcagctaccctggcccaggagctggagaaattcaatcgagaccagaaagctgaccaggaccgtctggatctggaagaacggaagaaagtagagacagaggccaagatcaagcaaaagctgcgggaaattgaagagaatcagaagcggattgagaaactggaggaatacatcaccactagcaagcagtccctagaagagcagaagaagctagagggggagctgacagaggaggtggagatggccaagcggcgtattgatgaaatcaataaggagctgaaccaggtgatggagcagctaggggatgcccgcatcgaccgccaggagagcagccgccagcagcgaaaggcagagataatggaaagcatcaagcgcctttaccctggctctgtgtacggccgcctcattgacctatgccagcccacacaaaagaagtatcagattgctgtaaccaaggttttgggcaagaacatggatgccattattgtggactcggagaagacaggccgggactgtattcagtatatcaaggagcagcgtggggagcctgagaccttcttgcctcttgactacctggaggtgaagcctacagatgagaaactccgggagctgaagggggccaagctagtgattgatgtgattcgctatgagccacctcatatcaaaaaggccctgcagtatgcttgtggcaatgcccttgtctgtgacaacgtggaagatgcccgccgcattgcctttggaggccaccagcgccacaagacagtggcactggatggaaccctattccagaagtcaggagtgatctctggtggggccagtgacctgaaggccaaggcacggcgctgggatgagaaagcagtagacaagttgaaagagaagaaggagcgcttgacagaggagctgaaagagcagatgaaggcaaaacggaaagaggcagagctgcgtcaggtgcagtctcaggcccatggactgcagatgcggctcaagtactcccagagtgacctagaacagaccaagacacgacatctagccctgaatctgcaggaaaaatccaagctggagagtgagctagccaactttgggcctcgcattaatgatatcaagaggatcattcagagccgagagagggaaatgaaagacttgaaggagaagatgaaccaggtagaggatgaggtgtttgaagagttttgtcgggagattggtgtgcgcaacatccgggagtttgaggaagaaaaggtgaaacggcagaatgaaatcgccaagaagcgtttggagtttgagaatcagaagactcgcttgggcattcagttggattttgaaaagaaccaactgaaggaggaccaagataaagtacacatgtgggagcagacagtgaaaaaagatgaaaatgagatagaaaagctcaaaaaggaggaacaaagacacatgaagatcatagatgagaccatggctcagctacaagacctgaagaatcagcatctggccaagaagtcggaagtgaatgacaagaatcatgagatggaggagattcgtaagaaactcgggggcgccaacaaggaaatgacccatttacagaaggaggtgacagccattgagaccaagcttgaacagaagcgcagtgaccgtcacaacttgctacaggcctgtaagatgcaggacattaagttgccactgtcaaaaggcaccatggatgatattagtcaggaagagggtagctcccagggggaggactcagtgagtggttcacagagaatttccagtatctatgcacgagaggccctcattgagattgactacggtgatctgtgtgaggatctgaaggatgcccaggctgaggaagagatcaagcaagagatgaacacactgcagcagaagctgaatgagcagcagagtgtgcttcagcgtattgccgcccccaacatgaaggccatggaaaagctggaaagtgtccgagacaagttccaggagacctcagatgagtttgaagcagcccgaaagcgagcaaagaaggccaagcaggcattcgaacagatcaagaaggagcgctttgaccgcttcaatgcttgttttgaatctgtggctaccaacattgatgagatctataaggccctgtcccgcaatagcagtgcccaggcattcctgggccctgagaaccctgaagagccctacttggatggcatcaactacaactgtgtggctcctgggaaacgcttccggcctatggacaacttgtcaggcggggagaagacagtggcagctctggccctgctctttgccatccacagctacaagccagcccccttcttcgtcctggatgagattgatgctgccttggataacaccaacattggcaaggtggcaaattacatcaaggagcagtcgacttgcaacttccaggccatcgtcatctctctcaaggaggagttctacaccaaggccgagagcctcattggagtctatcctgagcaaggggactgtgtgatcagcaaagtcctgaccttcgacctcaccaagtacccagatgccaaccccaaccccaatgagcagtagcagtatttttgccctcccgccctgtctggatccctaagctgtccctctcccaatctctggatatttgactcccaaccttccccctacctcctggccctttttggtgtagtcatgggatttaggcactgctaatcaagcatgaagaggaacagaggtgatgttaggtctggagcaaaaattcctgaacgacagggagtattctggcctctgaaaggaggtgctgagctgaacagggccatctgttcatcacacacacccccttcctccccctcatcacccataatcgtgggccccttgggcctcttgcccactgtgtgtgtgggtatgtatgtgtgtatgtatgtatccgcatgtgtgcatgtgagtatgtttgcaaaataataaaggatattggagacctgttttagaaggagcctaggctgaatttgattccaagagagcttaggatgacagcacccctgagctgggcaaaggtactcaggacctcataggagtcttaggcagttacctgaaactgccttcattcactcatttgtgtattcattcatttatgtattcatcagacacataccgaacaccctctatttgtcaggctctgtgcttggaatacagagttgaatcagacatgatctctaccctcctagtaaggagatacagtgggttcatgaatgactatagttagctgaatgtcatatgtactttgaatttgagaagtgggtgatcccctctaggcttcctggaggtcacatttaagctagaccttgacaaattggtaggatttggtcaggcactaggagtggagcatgagctctggggacagacagttatgggttctggtcccactttttatcacttactagttgtttgaccttgggcaagtcatttgaccttctgtgcctcagtttcctcatctgtaaaatggggctaacaatattacctacctcataggatttaatgatgtcaagctcctcactggaggccttatcccttcgtggagcccactaggtgccgacccctcagaatataaccctcatgcctggacccctgagagcttctgatcccagctattagggacagaagaagcctccaaatctggaaggtgctgaatgccctgctgactgggaaagtttcagggcactgatggggtctacctggtaagcggagggcctgaggaaacctgtagcttcaatcatgtctggtaaccgggtgcctgagccccaatctgggttgtgaggaaataggggagaggtatcctgggccacatcccagcctaacacctgtgaggttcattttaggaactaacctcattagctataaggatcatgcagaggcagcaaagccgggtgcgatgagctcagcctttactcattcacatacaccatcacactttaattccaatctgtatattgctttttaaaagttaagtccattctaattacccaaatatgcatgaattc

SEQ ID NO: 6193 - protein, 1233 aa, Homo sapiens
MGFLKLIEIENFKSYKGRQIIGPFQRFTAIIGPNGSGKSNLMDAISFVLGEKTSNLRVKTLRDLIHGAPVGKPAANRAFVSMVYSEEGAEDRTFARVIVGGSSEYKINNKVVQLHEYSEELEKLGILIKARNFLVFQGAVESIAMKNPKERTALFEEISRSGELAQEYDKRKKEMVKAEEDTQFNYHRKKNIAAERKEAKQEKEEADRYQRLKDEVVRAQVQLQLFKLYHNEVEIEKLNKELASKNKEIEKDKKRMDKVEDELKEKKKELGKMMREQQQIEKEIKEKDSELNQKRPQYIKAKENTSHKIKKLEAAKKSLQNAQKHYKKRKGDMDELEKEMLSVEKARQEFEERMEEESQSQGRDLTLEENQVKKYHRLKEEASKRAATLAQELEKFNRDQKADQDRLDLEERKKVETEAKIKQKLREIEENQKRIEKLEEYITTSKQSLEEQKKLEGELTEEVEMAKRRIDEINKELNQVMEQLGDARIDRQESSRQQRKAEIMESIKRLYPGSVYGRLIDLCQPTQKKYQIAVTKVLGKNMDAIIVDSEKTGRDCIQYIKEQRGEPETFLPLDYLEVKPTDEKLRELKGAKLVIDVIRYEPPHIKKALQYACGNALVCDNVEDARRIAFGGHQRHKTVALDGTLFQKSGVISGGASDLKAKARRWDEKAVDKLKEKKERLTEELKEQMKAKRKEAELRQVQSQAHGLQMRLKYSQSDLEQTKTRHLALNLQEKSKLESELANFGPRINDIKRIIQSREREMKDLKEKMNQVEDEVFEEFCREIGVRNIREFEEEKVKRQNEIAKKRLEFENQKTRLGIQLDFEKNQLKEDQDKVHMWEQTVKKDENEIEKLKKEEQRHMKIIDETMAQLQDLKNQHLAKKSEVNDKNHEMEEIRKKLGGANKEMTHLQKEVTAIETKLEQKRSDRHNLLQACKMQDIKLPLSKGTMDDISQEEGSSQGEDSVSGSQRISSIYAREALIEIDYGDLCEDLKDAQAEEEIKQEMNTLQQKLNEQQSVLQRIAAPNMKAMEKLESVRDKFQETSDEFEAARKRAKKAKQAFEQIKKERFDRFNACFESVATNIDEIYKALSRNSSAQAFLGPENPEEPYLDGINYNCVAPGKRFRPMDNLSGGEKTVAALALLFAIHSYKPAPFFVLDEIDAALDNTNIGKVANYIKEQSTCNFQAIVISLKEEFYTKAESLIGVYPEQGDCVISKVLTFDLTKYPDANPNPNEQ

SEQ ID NO: 6194 - DNA, 1542 bp, Homo sapiens
ccgggacgtcacgtggactggggccggataatggcgggcgctgcagaagatgcgcgagctcttttccgggctggggtctgcgcggccctggaggcctggccggccttgcagatcgctgtggagaatggcttcgggggtgtgcacagccaggagaaggccaagtggctggggggtgcagtggaggattacttcatgcgcaatgctgacttggagctagatgaggtggaagacttccttggagagctgttgaccaacgagtttgatacagttgtggaagacgggagtctgccccaggtgagccagcaactgcagaccatgttccaccacttccagaggggtgatggggctgctctgagggagatggcctcctgcatcactcagagaaaatgcaaggtcacagccactgcacttaagacagctagagagactgatgaggatgaagatgatgtggacagtgtggaagagatggaggtcacagctacgaatgatggggctgctacagatggggtctgcccccagcctgaaccctctgatccagacgctcagactattaaggaagaggatatagtggaagatggctggaccattgtccggagaaaaaaatgagtggggatgattggaaatggctttgggcccttatttgctgttctaagagttgtctgtaggggttttttttttgaggattgcagacctgtggactggttaccccatctccaccctctcccctgttcctctgtctggctccctccagggcaaggaaaacctagggtccttggtcttgggggtggggggaccttttccagcatattcccctgggcctttagttaacatccgagtgacgaagccgggttccccagtacagtgtcttttgggtgcggtcattgtgaggaaggggatgagtgagtgtgggtgtggctggaggaggagctagatgccggtggacagtgggcaggtggatttggggaggagaggatcagcagcagcagcagtactcagtgatagggggctggctgggtcaggaatggtgagatgaacatgcaagtggaagagagaatagttgaaaatgtgaatgaaagtagctctggagcctctcccttaccccaccccacacacacgcaacagctctgtacccctgcccagaacttggaacctcccaggaatgctgccttccttcagcccagcctccagtcctgggttccctcaggaattcgaagaccttggctaggtggtgagcttggaagagctgggctttgttttctgtctcctctaacctctttccttactccttatcccatcccatttgagttcaggggtgaggcttaagatcttaataaataataccttactgcttaatctgtggcttgacctgtgagtagtagccttagaatcagccttctgggagctcagcttcagagtttacaagggagcagtttctgggcccaccctagcagcctggtactttggacaaccaaacagatgaacgaacggagcacagcagtgctatgaaagttactgtaagcctgaaataaactgtatttttct

SEQ ID NO: 6195 - protein, 191 aa, Homo sapiens
MAGAAEDARALFRAGVCAALEAWPALQIAVENGFGGVHSQEKAKWLGGAVEDYFMRNADLELDEVEDFLGELLTNEFDTVVEDGSLPQVSQQLQTMFHHFQRGDGAALREMASCITQRKCKVTATALKTARETDEDEDDVDSVEEMEVTATNDGAATDGVCPQPEPSDPDAQTIKEEDIVEDGWTIVRRKK

SEQ ID NO: 6196 - DNA, 2357 bp, Homo sapiens
gatccggaagtcggagcctagctgcgcgagagtttctgctcgctcaaccgagttgtcgtgttgccctcgcttctcagatccccgccggaagtgaagagagcaagcagatttgaacctatctgctttcaagctggtcatcatgatgaaacttagacacaaaaataaaaagccaggtgaaggttccaagggccacaagaagataagttggccctaccctcagcctgcaaagcaaaatgggaagaaagcaacctccaaagtgccctctgcacctcattttgttcaccccaatgatcatgccaatcgagaggctgaattaaagaagaagtgggttgaggagatgagggagaagcagcaagccgcccgggagcaagaaagacaaaaacgcaggaccattgagagctactgtcaggatgtcctaagacgccaggaggagtttgagcataaggaggaagttttgcaggaattaaatatgtttcctcagctggatgacgaggccacgaggaaggcttattacaaggagttccgtaaggtggtggaatactctgatgtgattctggaagtcctggatgccagagacccattaggctgccgctgcttccaaatggaggaggctgtcctgcgagcacaaggcaacaagaagctggtcctggtcttgaacaagattgacctggtccccaaggaggttgtggagaaatggctggattaccttcggaatgagttgccaaccgtggctttcaaggccagtacccagcatcaggtcaaaaacctgaatcgttgcagtgtgccagtagatcaggcctctgagtcactgctgaaaagcaaagcctgctttggagctgaaaacctcatgagggttctggggaactattgccgccttggtgaagtgcgcacccacattcgtgtgggtgttgtgggtcttcccaatgttgggaagagcagcctgatcaatagcctgaagcgcagccgcgcatgcagcgtgggagctgttcctggaattaccaaattcatgcaggaggtctacctggacaagttcatccggctcttggatgctccaggcattgtcccagggcccaactcagaggtgggcaccatcctgcgtaactgcgtccacgtgcagaagctggcagaccctgtgaccccagtggagaccatcctgcagcgctgcaacctggaggagatttccaactattatggcgtctctgggttccagaccactgagcactttctgacggcagtggcccaccgtttggggaagaagaagaagggaggcttatatagtcaggaacaggcggccaaagctgtcctagctgactgggtgagcgggaagatcagcttctatataccaccaccagccactcacactctgcccacccatctcagtgctgagatcgttaaggaaatgaccgaggtctttgacatcgaggatactgagcaggccaatgaagacaccatggaatgcttggccaccggagaatctgatgagctgttgggtgacacggacccacttgaaatggagatcaagttgctccattctccgatgacgaaaatagcagatgccattgaaaataaaaccaccgtgtataagattggagatctcactgggtattgcaccaatccgaaccgtcatcagatggggtgggctaaacgcaatgtggaccaccgccctaagagcaacagtatggtggatgtctgctcagtggaccgccgctcagtgctgcagaggatcatggagacggaccccctgcaacagggccaggctctggcatctgccctgaaaaataagaagaagatgcagaaacgtgcagataaaatcgccagcaagctgtctgattccatgatgtctgctctcgacctctctggcaatgctgatgatggtgttggtgactaatcgactgatctcacttcccttccgctccaagcaccagttccggtggtacgggggaataccagtgaaatagtttggttctccctgaagcatctgcatattgaaagaacgctttccccactgtgtgtcttctccccctcctccagtaaaaacagtcccggctaggtgctgtggctcacgtctgtaatcccagcactttgggaggccgaggtgggcagatcacctgaggtcaggagttcgagaccagcctggccaacatggtgaaaccccgtctctactaaaaatacaaaaaaatttagccgtgcttagtggcacctataatcccagctacttgggaggctgaggcaggagaatcgcctgaacctgggagactaaggcaggagaatcgcctgaacctgggaggcagaggttgcagtgagcccagacggcaccattgcactctagcctgggcaacaacacgaaactccgtccc

SEQ ID NO: 6197 - DNA, 1982 bp, Homo sapiens
tagagaaggcagacgcatcccgaactcgctggaggacaaggctcagctcttgccaggccaaattgagacatgtctgacacaagcgagagtggtgcaggtctaactcgcttccaggctgaagcctcagaaaaggacagtagctcgatgatgcagactctgttgacagtgacccagaatgtggaggtcccagagacaccgaaggcctcaaaggcactggaggtctcagaggatgtgaaggtctcaaaagcctctggggtctcaaaggccacagaggtctcaaagaccccagaggctcgggaggcacctgccacccaggcctcatctactactcagctgactgatacccaggttctggcagctgaaaacaagagtctagcagctgacaccaagaaacagaatgctgacccgcaggctgtgacaatgcctgccactgagaccaaaaaggtcagccatgtggctgatacaaaggtcaatacaaaggctcaggagactgaggctgcaccctctcaggccccagcagatgaacctgagcctgagagtgcagctgcccagtctcaggagaatcaggatactcggcccaaggtcaaagccaagaaagcccgaaaggtgaagcatctggatggggaagaggatggcagcagtgatcagagtcaggcttctggaaccacaggtggccgaagggtctcaaaggccctaatggcctcaatggcccgcagggcttcaaggggtcccatagccttttgggcccgcagggcatcaaggactcggttggctgcttgggcccggagagccttgctctccctgagatcacctaaagcccgtaggggcaaggctcgccgtagagctgccaagctccagtcatcccaagagcctgaagcaccaccacctcgggatgtggcccttttgcaagggagggcaaatgatttggtgaagtaccttttggctaaagaccagacgaagattcccatcaagcgctcggacatgctgaaggacatcatcaaagaatacactgatgtgtaccccgaaatcattgaacgagcaggctattccttggagaaggtatttgggattcaattgaaggaaattgataagaatgaccacttgtacattcttctcagcaccttagagcccactgatgcaggcatactgggaacgactaaggactcacccaagctgggtctgctcatggtgcttcttagcatcatcttcatgaatggaaatcggtccagtgaggctgtcatctgggaggtgctgcgcaagttggggctgcgccctgggatacatcattcactctttggggacgtgaagaagctcatcactgatgagtttgtgaagcagaagtacctggactatgccagagtccccaatagcaatccccctgaatatgagttcttctggggcctgcgctcttactatgagaccagcaagatgaaagtcctcaagtttgcctgcaaggtacaaaagaaggatcccaaggaatgggcagctcagtaccgagaggcgatggaagcggatttgaaggctgcagctgaggctgcagctgaagccaaggctagggccgagattagagctcgaatgggcattgggctcggctcggagaatgctgccgggccctgcaactgggacgaagctgatatcggaccctgggccaaagcccggatccaggcgggagcagaagctaaagccaaagcccaagagagtggcagtgccagcactggtgccagtaccagtaccaataacagtgccagtgccagtgccagcaccagtggtggcttcagtgctggtgccagcctgaccgccactctcacatttgggctcttcgctggccttggtggagctggtgccagcaccagtggcagctctggtgcctgtggtttctcctacaagtgagattttagatattgttaatcctgccagtctttctcttcaagccagggtgcatcctcagaaacctatccaacacagcactctaggcagccact

SEQ ID NO: 6198 - protein, 606 aa, Homo sapiens
MSDTSESGAGLTRFQAEASEKDSSSMMQTLLTVTQNVEVPETPKASKALEVSEDVKVSKASGVSKATEVSKTPEAREAPATQASSTTQLTDTQVLAAENKSLAADTKKQNADPQAVTMPATETKKVSHVADTKVNTKAQETEAAPSQAPADEPEPESAAAQSQENQDTRPKVKAKKARKVKHLDGEEDGSSDQSQASGTTGGRRVSKALMASMARRASRGPIAFWARRASRTRLAAWARRALLSLRSPKARRGKARRRAAKLQSSQEPEAPPPRDVALLQGRANDLVKYLLAKDQTKIPIKRSDMLKDIIKEYTDVYPEIIERAGYSLEKVFGIQLKEIDKNDHLYILLSTLEPTDAGILGTTKDSPKLGLLMVLLSIIFMNGNRSSEAVIWEVLRKLGLRPGIHHSLFGDVKKLITDEFVKQKYLDYARVPNSNPPEYEFFWGLRSYYETSKMKVLKFACKVQKKDPKEWAAQYREAMEADLKAAAEAAAEAKARAEIRARMGIGLGSENAAGPCNWDEADIGPWAKARIQAGAEAKAKAQESGSASTGASTSTNNSASASASTSGGFSAGASLTATLTFGLFAGLGGAGASTSGSSGACGFSYK

SEQ ID NO: 6199 - DNA, 1991 bp, Homo sapiens
tggccaacttctgaacaggaagcagttcgctcgcgcctaggttggcgcgggctgggaggtgttccagccctttaagatgttgcgcgtggtgagctggaacatcaatgggattcggagacccctgcaaggggtggcaaatcaggaacccagcaactgtgccgccgtggccgtggggcgcattttggacgagctggatgcggatatcgtctgtctccaggaaaccaaagtgaccagggatgcactgacagagcccctggctatcgttgagggttataactcctatttcagcttcagccgcaaccgtagcggctattctggtgtagccaccttctgtaaggacaatgctaccccagtggctgctgaagaaggcctgagtggcctgtttgccacccagaatggggatgttggttgctatggaaacatggatgagtttacccaagaggaactccgggctctggatagtgagggcagggccctcctcacacagcataagatccgcacatgggaaggtaaggagaagaccttgaccctaatcaacgtgtactgcccccatgcggaccctgggaggcctgagcggctagtctttaagatgcgcttctatcgtttgctgcaaatccgagcagaagccctcctggcggcaggcagccatgtgatcattctgggtgacctgaatacagcccaccgccccattgaccactgggatgcagtcaacctggaatgctttgaagaggacccagggcgcaagtggatggacagcttgctcagtaacttggggtgccagtctgcctctcatgtagggcccttcatcgatagctaccgctgcttccaaccaaagcaggagggggccttcacctgctggtcagcagtcactggcgcccgccatctcaactatggctcccggcttgactatgtgctgggggacaggaccctggtcatagacacctttcaggcctctttcctgctgcctgaggtgatgggctctgaccactgccctgtgggtgcagtcttgagtgtgtcctctgtgcctgcaaaacagtgcccacctctgtgcacccgcttcctccctgagtttgcaggcacccagctcaagatccttcgcttcctagttcctctcgaacaaagtcctgtgttggagcagtcgacgctgcagcacaacaatcaaacccgggtacagacatgccaaaacaaagcccaagtgcgctcaaccaggcctcagcccagtcaggttggctctagcagaggccagaaaaacctgaagagctactttcagccctcccctagctgtccccaagcctctcctgacatagagctgcctagcctaccactgatgagcgccctcatgaccccgaagactccagaagagaaggcagtggccaaagtggtgaaggggcaggccaagacttcagaagccaaagatgagaaggagttacggacctcattctggaagtctgtgctggcggggcccttgcgcacacccctctgtgggggccacagggagccatgtgtgatgcgtactgtgaagaagccaggacccaacttgggccgccgcttctacatgtgtgccaggccccggggtcctcccactgacccctcctcccggtgcaacttcttcctctggagcaggcccagctgaaccaatggaggcctggggacatctggcatggtcacccctgcacatgatctgaggccagctccccttccctgagctgcctcctgcttctccctcaaagtctcctacccttctcttcctcttttaagccctctcttcctcgctttccttcctacctagctccttgttggtgagcttcttgtgccttaatcctgtgacccagccccttacaccactttccaccttcctgtccgaagtacacggacactagctgccccaggaagttgtgtgattttaaatcacttctgtctttgctggaaagtgtatttgtgcataaataaagtctgtgtatttgtttcagggttgcaaaaaaaaaaaaaaa

SEQ ID NO: 6200 - protein, 518 aa, Homo sapiens
MLRVVSWNINGIRRPLQGVANQEPSNCAAVAVGRILDELDADIVCLQETKVTRDALTEPLAIVEGYNSYFSFSRNRSGYSGVATFCKDNATPVAAEEGLSGLFATQNGDVGCYGNMDEFTQEELRALDSEGRALLTQHKIRTWEGKEKTLTLINVYCPHADPGRPERLVFKMRFYRLLQIRAEALLAAGSHVIILGDLNTAHRPIDHWDAVNLECFEEDPGRKWMDSLLSNLGCQSASHVGPFIDSYRCFQPKQEGAFTCWSAVTGARHLNYGSRLDYVLGDRTLVIDTFQASFLLPEVMGSDHCPVGAVLSVSSVPAKQCPPLCTRFLPEFAGTQLKILRFLVPLEQSPVLEQSTLQHNNQTRVQTCQNKAQVRSTRPQPSQVGSSRGQKNLKSYFQPSPSCPQASPDIELPSLPLMSALMTPKTPEEKAVAKVVKGQAKTSEAKDEKELRTSFWKSVLAGPLRTPLCGGHREPCVMRTVKKPGPNLGRRFYMCARPRGPPTDPSSRCNFFLWSRPS

SEQ ID NO: 6201 - DNA, 1151 bp, Homo sapiens
gccaccgccagcagggaggcggagggctagcgagccaagcggtggggacgccgctgccttcctctttgcctgtctcgccgccctcctagacacgctcctcatctacggatcctaccctccccgctcttgcaagcattcactcggccggtcgcctgctgaccctccttcgccacaggctcgtagcggaggcagcagcgagcaggcatgaagacccccaacgcacaggaagccgaagggcaacaaaccagggcagctgcaggacgggccactgggtctgcaaacatgacaaagaaaaaagtctcccaaaagaagcagagaggccgaccttcatcccagccccgcaggaacatcgtgggctgcagaatttctcatggatggaaggaaggagatgagcccatcacgcagtggaaaggaaccgttctggatcaggtgcctataaatccctctctttatctggtgaaatatgatggaattgactgtgtctatggactggaacttcacagagatgaaagggttttgtctcttaaaattctttctgacagggtggcatcatctcacattagtgatgccaaccttgcaaataccataattggcaaagcagtggaacatatgtttgagggagagcatggttctaaggatgaatggagggggatggtcttagctcaagcacctatcatgaaagcctggttttatattacctatgagaaagatcctgtcttgtacatgtaccagcttctagatgattataaggaaggtgacctccgcatcatgccagaatccagtgagtctcctccaacagagagggagccaggaggagttgtagatggcctaataggtaagcatgtggaatataccaaagaagatggctccaaaaggatcggcatggtcattcaccaagtggaagccaaaccctctgtgtatttcatcaagtttgatgatgatttccatatctatgtctacgatttggtgaaaaagtcctaactgttagggtaaaatttggcacatgtgtggaaacaaatgtataatttgtagacatgcaaaaaatgttgcctttcagtgtattgaaagcttatggaatccctgataactaaacatctttgccagcattaactgttgttttgctctaaaaaatacaaacttgtgtgtacatg

SEQ ID NO: 6202 - protein, 258 aa, Homo sapiens
MKTPNAQEAEGQQTRAAAGRATGSANMTKKKVSQKKQRGRPSSQPRRNIVGCRISHGWKEGDEPITQWKGTVLDQVPINPSLYLVKYDGIDCVYGLELHRDERVLSLKILSDRVASSHISDANLANTIIGKAVEHMFEGEHGSKDEWRGMVLAQAPIMKAWFYITYEKDPVLYMYQLLDDYKEGDLRIMPESSESPPTEREPGGVVDGLIGKHVEYTKEDGSKRIGMVIHQVEAKPSVYFIKFDDDFHIYVYDLVKKS

SEQ ID NO: 6203 - DNA, 2468 bp, Homo sapiens
ggcagtgggggttacagacagcaccagaggcactcagggcaggagggtagtgggtgctggtcaaggccgctttgcaggggattgggagtggatgctagtggcagtaaagggtaaagggagggcagtgggctctgagctaggaggaggtggcccagccacttctgcagagttcctaaccccagacagctctactgcaccaccccagcccttccccacagcccaaaggaacttaagagggagagcactgcgggcatgcagccaggatttccagcattgcttccaggctcctaggggaaacttaggcactagcgcagactacatccagacatggctatagggaaaagtttgccttgtggcacactgggtgtgtctctctatcctctctcctcccccagcaggcatgaagacccccaacgcacaggaagccgaagggcaacaaaccagggcagctgcaggacgggccactgggtctgcaaacatgacaaagaaaaaagtctcccaaaagaagcagagaggccgaccttcatcccagccccgcaggaacatcgtgggctgcagaatttctcatggatggaaggaaggagatgagcccatcacgcagtggaaaggaaccgttctggatcaggtgcctataaatccctctctttatctggtgaaatatgatggaattgactgtgtctatggactggaacttcacagagatgaaagggttttgtctcttaaaattctttctgacagggtggcatcatctcacattagtgatgccaaccttgcaaataccataattggcaaagcagtggaacacatgtttgagggagagcatggttctaaggatgaatggagggggatggtcttagctcaagcacctatcatgaaagcctggttttatattacctatgagaaagatcctgtcttgtacatgtaccagcttctagatgattataaggaaggtgacctccgcatcatgccagaatccagtgagtctcctccaacagagagggagccaggaggagttgtagatggcctaataggtaagcatgtggaatataccaaagaagatggctccaaaaggatcggcatggtcattcaccaagtggaaaccaaaccctctgtgtatttcatcaagtttgatgatgatttccatatctatgtctacgatttggtgaaaaagtcctaactgttagggtaaaatttggcacatgtgtggaaacaaatgtataatttgtagacatgcaaaaaatgttgcctttcagtgtactgaaagcttatggaatccctgataactaaacatctttgccagcattaactgttgttttgctctaaaaaatacaaatttgtgaatacatgacatgctgtctgtaagccctttgtcttgttgaaaagttcgggtgtgtttggtagatggggcatggaaggaacgaacagctgtcaatttcggctgtgaataaagttcagctagaatcataatcagtcatttaaaaatggcactggatttagctggtctggtctggagggggcaggggaaggaacaagagattggctgtcttggggagagaggaggaggtgactgcttaggaagaggtggaaaagggccagaaagggaggggctccttgggggaggggatgacctatgagaaggaaacatccaactcagaaggaagactaacagagggagagtgagatcttggggcttagaggaaaatagaataaactgagtagagaggaacacaaagaagcttagaagagggtccagagtaaggtggagaaggatcaacctgacagggatctgggagaggctaaaggatacacaaaggaagaggctatgtgggttagggtgttggagggattagaagagggccactgaggaaggaggaattcaaagaagaaagactgacagagggagtgagaatacaggaaaagagttgtggggtatggggcccatgagagatcggaaggcccaggaaaatgttggacttctggtagtgtccacattgctcttcctggctctatgcacaaaggaagtggcaactgtcaaagatgccagatgcattggaggttcactagaagagcatgttgacaggaatgactcagtcaagttaatcaggagccaagtttatgcccataaggcttttcctgtttcagggagttaatgacacacttgtccagcagaaacccaatgctcagcctaaacacgctaacatggtgccccacatgtgctgggctgtgggctgcctcctcacatttgtcctgcgctagataagcaatcttggtagaggatgggttagtggggctctcagaacttaagagatgtgccatcttgcatttggaaagtactttatccagaaaaaatgaaatcttactgaactcaggtacagcagtctcatcactcctattccttctgctggaatgtttgttttctatctagagatgaggggcatcagaggactgagcctagtgtttctctcgag

SEQ ID NO: 6204 - DNA, 1787 bp, Homo sapiens
ggtagcaggaggctggaagaaaggacagaagtagctctggctgtgatggggatcttactgggcctgctactcctggggcacctaacagtggacacttatggccgtcccatcctggaagtgccagagagtgtaacaggaccttggaaaggggatgtgaatcttccctgcacctatgaccccctgcaaggctacacccaagtcttggtgaagtggctggtacaacgtggctcagaccctgtcaccatctttctacgtgactcttctggagaccatatccagcaggcaaagtaccagggccgcctgcatgtgagccacaaggttccaggagatgtatccctccaattgagcaccctggagatggatgaccggagccactacacgtgtgaagtcacctggcagactcctgatggcaaccaagtcgtgagagataagattactgagctccgtgtccagaaactctctgtctccaagcccacagtgacaactggcagcggttatggcttcacggtgccccagggaatgaggattagccttcaatgccaggctcggggttctcctcccatcagttatatttggtataagcaacagactaataaccaggaacccatcaaagtagcaaccctaagtaccttactcttcaagcctgcggtgatagccgactcaggctcctatttctgcactgccaagggccaggttggctctgagcagcacagcgacattgtgaagtttgtggtcaaagactcctcaaagctactcaagaccaagactgaggcacctacaaccatgacataccccttgaaagcaacatctacagtgaagcagtcctgggactggaccactgacatggatggctaccttggagagaccagtgctgggccaggaaagagcctgcctgtctttgccatcatcctcatcatctccttgtgctgtatggtggtttttaccatggcctatatcatgctctgtcggaagacatcccaacaagagcatgtctacgaagcagccagggcacatgccagagaggccaacgactctggagaaaccatgagggtggccatcttcgcaagtggctgctccagtgatgagccaacttcccagaatctgggcaacaactactctgatgagccctgcataggacaggagtaccagatcatcgcccagatcaatggcaactacgcccgcctgctggacacagttcctctggattatgagtttctggccactgagggcaaaagtgtctgttaaaaatgccccattaggccaggatctgctgacataattgcctagtcagtccttgccttctgcatggccttcttccctgctacctctcttcctggatagcccaaagtgtccgcctaccaacactggagccgctgggagtcactggctttgccctggaatttgccagatgcatctcaagtaagccagctgctggatttggctctgggcccttctagtatctctgccgggggcttctggtactcctctctaaataccagagggaagatgcccatagcactaggacttggtcatcatgcctacagacactattcaactttggcatcttgccaccagaagacccgagggaggctcagctctgccagctcagaggaccagctatatccaggatcatttctctttcttcagggccagacagcttttaattgaaattgttatttcacaggccagggttcagttctgctcctccactataagtctaatgttctgactctctcctggtgctcaataaatatctaatcataacagcaaaaaaaaaaaaaaaaaaa

SEQ ID NO: 6205 - protein, 399 aa, Homo sapiens
MGILLGLLLLGHLTVDTYGRPILEVPESVTGPWKGDVNLPCTYDPLQGYTQVLVKWLVQRGSDPVTIFLRDSSGDHIQQAKYQGRLHVSHKVPGDVSLQLSTLEMDDRSHYTCEVTWQTPDGNQVVRDKITELRVQKLSVSKPTVTTGSGYGFTVPQGMRISLQCQARGSPPISYIWYKQQTNNQEPIKVATLSTLLFKPAVIADSGSYFCTAKGQVGSEQHSDIVKFVVKDSSKLLKTKTEAPTTMTYPLKATSTVKQSWDWTTDMDGYLGETSAGPGKSLPVFAIILIISLCCMVVFTMAYIMLCRKTSQQEHVYEAARAHAREANDSGETMRVAIFASGCSSDEPTSQNLGNNYSDEPCIGQEYQIIAQINGNYARLLDTVPLDYEFLATEGKSVC

SEQ ID NO: 6206 - DNA, 1712 bp, Homo sapiens
cagtagtgctagcagcttcgcggttcggtcctcggacccggcagccaccactggtgctgagctgctaggaagcccctatcggcgagctctttggagcttgaacccattgtcactcctccgactcaccggaaaaaacaaaaaatgggtgaagcagatcgcctaggaaagtttttcattggtgggcttaatacggaaacaaataagaaagctcttgaagcagtatttggcaaatatggacaaatagtggaagtacacttgatgaaagactgtgaaaccaacaaatcaagaggatttgcttttatcacctttgaaagaccagcagacgctaaggatgcagccagagacatgaatggaaagtcattagatggaaaagccatcaaggtggaacaagccaccaaaccgtcatttgaaagtggtagacgtggaccgcctccacctccaagaagtagaggccctccaagagttcttagaggtggaagaggaggaagtggaggaaccagggaacctccctcacggggaggacacatggatgactggtggatattccatgaattttaacatgagttcttccaggggaccactcccagtaaaaagaggaccaccaccaagaagtgggggtcttcctcctaagagatctgcaccttcaggaccagttcgcagtagcagtggaatgggaggaagagctcctgtatcacgtggaagagatagttaccgaggtccacctcgaagggaatcgctgccctcttgtagagagctccacctacacgagggcgcccccatcttatggtggaagcagtcgctatgatgattacagcagctcacgtgacggatatggtggaagtcgagacagttactcaagcagtcgaagtgatctctactcaagtggtcgtgatcaggttggcagacaagaaagagggcttcccccttctatggaaagggggtaccctcctccacgtgattcctacagcagttcaagccgtggaacaccaagaggtggtggccgtggaggaagccgatctgatagagggggaggcagaagcagatactagaaacaaacaaaactttgtaccaaaatcccagttcaaagaaacaaaaagtggaaactattctatcataactacccaagaactactaaaaggaaaaattgtgttaccttttttaaaattccctgttaagctcccctccataatttttatgttcttgtgaggaaaaaaagtaaaacatgtttaattttatttgacttttgcattgcttttcaacaagcaaatgttaaatgtgttaagacttatactagtgttgtaactttccaagtaaaagtatccctaaaggccacttcctatctgatttttcccagtaaatgaggcaggcaattctaagatcttccacaaaacatctagccatctaaaatggagagatgaatcattctacctacacaaacaagctagctattagagggtggttgggatatgctactcataagatttcagggtgtcttccaactgaaatctcaatgttcttagtatgaaaaacctgaaatcgcatgcctattcacccagtaaacccaaaaaagcaaatggataatgctggccattctgcctttctgacatttccttgggaatctgcaagaacctcccctttcccctcccccaataagaccatttaagtgtgtgctaaacaactaagaatactaaataaaatgtttggccaaaacc

SEQ ID NO: 6207 - DNA, 3864 bp, Homo sapiens
ggccagccgaatccaagccgtgtgtactgcgtgctcagcactgcccgacagtcctagctaaacttcgccaactccgctgcctttgccgccaccatgcccaaaacgatcagtgtgcgtgtgaccaccatggatgcagagctggagtttgccatccagcccaacaccaccgggaagcagctatttgaccaggtggtgaaaactattggcttgagggaagtttggttctttggtctgcagtaccaggacactaaaggtttctccacctggctgaaactcaataagaaggtgactgcccaggatgtgcggaaggaaagccccctgctctttaagttccgtgccaagttctaccctgaggatgtgtccgaggaattgattcaggacatcactcagcgcctgttctttctgcaagtgaaagagggcattctcaatgatgatatttactgcccgcctgagaccgctgtgctgctggcctcgtatgctgtccagtctaagtatggcgacttcaataaggaagtgcataagtctggctacctggccggagacaagttgctcccgcagagagtcctggaacagcacaaactcaacaaggaccagtgggaggagcggatccaggtgtggcatgaggaacaccgtggcatgctcagggaggatgctgtcctggaatatctgaagattgctcaagatctggagatgtatggtgtgaactacttcagcatcaagaacaagaaaggctcagagctgtggctgggggtggatgccctgggtctcaacatctatgagcagaatgacagactaactcccaagataggcttcccctggagtgaaatcaggaacatctctttcaatgataagaaatttgtcatcaagcccattgacaaaaaagccccggacttcgtcttctatgctccccggctgcggattaacaagcggatcttggccttgtgcatggggaaccatgaactatacatgcgccgtcgcaagcctgataccattgaggtgcagcagatgaaggcacaggcccgggaggagaagcaccagaagcagatggagcgtgctatgctggaaaatgagaagaagaagcgtgaaatggcagagaaggagaaagagaagattgaacgggagaaggaggagctgatggagaggctgaagcagatcgaggaacagactaagaaggctcagcaagaactggaagaacagacccgtagggctctggaacttgagcaggaacggaagcgtgcccagagcgaggctgaaaagctggccaaggagcgtcaagaagctgaagaggccaaggaggccttgctgcaggcctcccgggaccagaaaaagactcaggaacagctggccttggaaatggcagagctgacagctcgaatctcccagctggagatggcccgacagaagaaggagagtgaggctgtggagtggcagcagaaggcccagatggtacaggaagacttggagaagacccgtgctgagctgaagactgccatgagtacacctcatgtggcagagcctgctgagaatgagcaggatgagcaggatgagaatggggcagaggctagtgctgacctacgggctgatgctatggccaaggaccgcagtgaggaggaacgtaccactgaggcagagaagaatgagcgtgtgcagaagcacctgaaggccctcacttcggagctggccaatgccagagatgagtccaagaagactgccaatgacatgatccatgctgagaacatgcgactgggccgagacaaatacaagaccctgcgccagatccggcagggcaacaccaagcagcgcattgacgaatttgagtctatgtaatgggcacccagcctctagggacccctcctccctttttccttgtccccacactcctacacctaactcacctaactcatactgtgctggagccactaactagagcagccctggagtcatgccaagcatttaatgtagccatgggaccaaacctagccccttagcccccacccacttccctgggcaaatgaatggctcactatggtgccaatggaacctcctttctcttctctgttccattgaatctgtatggctagaatatcctacttctccagcctagaggtactttccacttgattttgcaaatgcccttacacttactgttgtcctatgggagtcaagtgtggagtaggttggaagctagctcccctcctctcccctaccactgtcttcttcagggtcctgagatttacacggttggagtgttatgcggtctagggaatgagacaggacctaggatatcttctccaggatgtcaactgacctaaaatttgccctcccatcccgtttagagttatttaggctttgtaacgattgggggataaaaagatgttcagtcatttttgtttctacctcccagatcggatctgttgcaaactcagcctcaataagccttgtcgttgactttagggactcaatttctccccagggtggatgggggaaatggtgccttcaagaccttcaccaaacatactagaagggcattggccattctattgtggcaaggctgagtagaagatcctaccccaattccttgtaggagtataggccggtctaaagtgagctctatgggcagatctaccccttacttattattccagatctgcagtcacttcgtgggatctgcccctccctgcttcaatacccaaatcctctccagctataacagtagggatgagtacccaaaagctcagccagccccatcaggactcttgtgaaaagagaggatatgttcacacctagcgtcagtattttccctgctaggggttttaggtctcttcccctctcagagctacttgggccatagctcctgctccacagccatcccagccttggcatctagagcttgatgccagtaggctcaactagggagtgagtgcaaaaagctgagtatggtgagagaagcctgtgccctgatccaagtttactcaaccctctcaggtgaccaaaatccccttctcatcactcccctccaaagaggtgactgggccctgcctctgtttgacaaacctctaacccaggtcttgacaccagctgttctgtcccttggagctgtaaaccagagagctgctggggattctggcctagtcccttccacacccccaccccttgctctcaacccaggagcatccacctccttctctgtctcatgtgtgctcttcttctttctacagtattatgtactctactgatatctaaatattgatttctgccttccttgctaatgcaccattagaagatattagtcttggggcaggatgattttggcctcattactttaccacccccacacctggaaagcatatactatattacaaaatgacattttgccaaaattattaatataagaagctttcagtattagtgatgtcatctgtcactataggtcatacaatccattcttaaagtacttgttatttgtttttattattactgtttgtcttctccccagggttcagtcctcaaggggccatcctgtcccaccatgcagtgcccctagcttagagcctccctcaattccccctggccaccaccccccactctgtgcctgaccttgaggagtcttgtgtgcattgctgtgaattagctcacttggtgatatgtcctatattggctaaattgaaacctggaattgtggggcaatctattaatagctgccttaaagtcagtaacttacccttagggaggctgggggaaaaggttagattttgtattcaggggttttttgtgtactttttgggttttttaaaaattgtttttggaggggtttatgctcaatccatgttctatttcagtgccaataaaatttaggaagacttc

SEQ ID NO: 6208 - protein, 577 aa, Homo sapiens
MPKTISVRVTTMDAELEFAIQPNTTGKQLFDQVVKTIGLREVWFFGLQYQDTKGFSTWLKLNKKVTAQDVRKESPLLFKFRAKFYPEDVSEELIQDITQRLFFLQVKEGILNDDIYCPPETAVLLASYAVQSKYGDFNKEVHKSGYLAGDKLLPQRVLEQHKLNKDQWEERIQVWHEEHRGMLREDAVLEYLKIAQDLEMYGVNYFSIKNKKGSELWLGVDALGLNIYEQNDRLTPKIGFPWSEIRNISFNDKKFVIKPIDKKAPDFVFYAPRLRINKRILALCMGNHELYMRRRKPDTIEVQQMKAQAREEKHQKQMERAMLENEKKKREMAEKEKEKIEREKEELMERLKQIEEQTKKAQQELEEQTRRALELEQERKRAQSEAEKLAKERQEAEEAKEALLQASRDQKKTQEQLALEMAELTARISQLEMARQKKESEAVEWQQKAQMVQEDLEKTRAELKTAMSTPHVAEPAENEQDEQDENGAEASADLRADAMAKDRSEEERTTEAEKNERVQKHLKALTSELANARDESKKTANDMIHAENMRLGRDKYKTLRQIRQGNTKQRIDEFESM

SEQ ID NO: 6209 - DNA, 674 bp, Homo sapiens
tagaagatcctaccccaattccttgtaggagtataggccggtctaaagtgagctctatgggcagatctaccccttacttattattccagatctgcagtcacttcgtgggatctgcccctccctgcttcaatacccaaatcctctccagctataacagtagggatgagtacccaaaagctcagccagccccatcaggactcttgtgaaaagagaggatatgttcacacctagcgtcagtattttccctgctaggggttttaggtctcttcccctctcagagctacttgggccatagctcctgctccacagccatcccagccttggcatctagagcttgatgccagtaggctcaactagggagtgagtgcaaaaagctgagtatggtgagagaagcctgtgccctgatccaagtttactcaaccctctcaggtgaccaaaatccccttctcatcactcccctccaaagaggtgactgggccctgcctctgtttgacaaacctctaacccaggtcttgacaccagctgttctgtcccttggagctgtaaaccagagagctgctggggattctggcctagtcccttccacacccccaccccttgctctcaacccaggagcatccacctccttctctgtctcatgtgtgctcttcttctttcagtattagtgatgtcat

SEQ ID NO: 6210 - DNA, 2438 bp, Homo sapiens
gtgcggagcggcgcggcacagagcctgttgttgagctcagtatgtcgtgggaatccggggccgggccaggtctaggttcccaggggatggatctcgtgtggagtgcgtggtacggaaagtgcgttaaagggaaagggtcgttgccactctcggcccacggcatcgtggtcgcctggctcagcagggccgagtgggaccaggtgacggtttatctgttctgtgacgaccataagttgcagcggtacgcgcttaaccgcatcacggtgtggaggagcaggtcaggcaacgaactccctctggcagtggcttctactgctgacctgatacgctgtaagctcttggatgtaactggtggcttgggcactgatgaacttagactgctctatggcatggcattggtcaggtttgtgaatcttatctcagagaggaagacaaagtttgccaaggtccccctcaagtgtctggctcaagaggtaaatattccggattggattgttgaccttcgccatgagttgacccacaagaaaatgccccatataaatgactgccgcagaggctgctactttgtcctggattggctccagaagacctattggtgccgccaactggagaacagcctgagagagacctgggagttggaggagttcagggaagggatagaggaagaggatcaagaggaagataagaacattgttgttgatgacatcacagaacagaaaccagagcctcaggatgatgggaaaagtacggagtcagatgtaaaggccgatggagacagcaaaggcagcgaagaggtggattctcattgcaaaaaggccctgagtcataaagagctatatgaaagagcccgagaactgctggtatcatacgaagaggagcagtttacggtgctggagaaatttaggtatttacctaaggccattaaggcgtggaataacccgtccccacgtgtagaatgtgtcctggcagagctcaagggcgttacatgcgagaacagggaggctgtgctggatgcttttctggatgatggcttccttgtccccacatttgaacagttggcagctttgcagatagaatatgaagatggtcagactgaggtccagagaggggaaggtactgacccaaagtcacacaaaaacgtggacttgaatgacgtcctggtgccaaagccgttctctcagttctggcagcccctgctcaggggcctgcactcccagaacttcacgcaggccctattggagaggatgctctctgaactgccagccttggggatcagcgggatccggcctacctacatcctcagatggaccgttgaactgatcgtggccaacaccaagactggacggaatgctcgccgattttctgcaggccagtgggaagcaagaaggggctggaggctgttcaactgctccgcctcccttgactggccccggatggttgagtcctgcttgggctcaccttgctgggccagcccccaactccttcggatcatcttcaaagccatggggcagggcctgccagacgaggagcaggagaagctgctgcgcatctgttccatttatacccagagtggagaaaacagcctggtgcaggagggctctgaggcctcccccattgggaagtctccatatacactagacagcctgtattggagcgtcaagccagccagctccagcttcgggtctgaagcaaaggcccagcaacaggaggagcagggcagtgttaatgatgtcaaggaagaggagaaggaggagaaagaggtcttgccagaccaggtagaggaggaggaagaaaatgatgaccaagaggaggaagaggaggatgaagatgatgaagatgatgaagaggaagacagaatggaggtggggcctttctctacagggcaagagtcccccactgccgagaatgctaggcttctggcccagaaaagaggagctttgcagggctctgcatggcaggttagctcagaagacgtgcgatgggacacatttcccctaggccgaatgccaggtcagaccgaggacccagcagagctcatgctggagaattatgacaccatgtatcttttggaccagcctgtgctagagcagcggctggaaccctcaacatgcaagactgacaccttgggcctgagctgtggtgtcggcagtggcaactgcagcaacagcagcagcagcaacttcgagggccttctctggagccaggggcagctgcatgggctcaaaactggcctgcagctcttctgatggccatccctggtgcaagtgttcatccagccgtgccagggcaacagcccaccccctagtacaactgatgctccctgagacaacctgggagacagcctggatcagccacatcaactcagttgtccaccacaggggaattttgaatgtcttttgtttttgttttgttttgaaaaataataaacaggcaactgt

SEQ ID NO: 6211 - protein, 734 aa, Homo sapiens
MSWESGAGPGLGSQGMDLVWSAWYGKCVKGKGSLPLSAHGIVVAWLSRAEWDQVTVYLFCDDHKLQRYALNRITVWRSRSGNELPLAVASTADLIRCKLLDVTGGLGTDELRLLYGMALVRFVNLISERKTKFAKVPLKCLAQEVNIPDWIVDLRHELTHKKMPHINDCRRGCYFVLDWLQKTYWCRQLENSLRETWELEEFREGIEEEDQEEDKNIVVDDITEQKPEPQDDGKSTESDVKADGDSKGSEEVDSHCKKALSHKELYERARELLVSYEEEQFTVLEKFRYLPKAIKAWNNPSPRVECVLAELKGVTCENREAVLDAFLDDGFLVPTFEQLAALQIEYEDGQTEVQRGEGTDPKSHKNVDLNDVLVPKPFSQFWQPLLRGLHSQNFTQALLERMLSELPALGISGIRPTYILRWTVELIVANTKTGRNARRFSAGQWEARRGWRLFNCSASLDWPRMVESCLGSPCWASPQLLRIIFKAMGQGLPDEEQEKLLRICSIYTQSGENSLVQEGSEASPIGKSPYTLDSLYWSVKPASSSFGSEAKAQQQEEQGSVNDVKEEEKEEKEVLPDQVEEEEENDDQEEEEEDEDDEDDEEEDRMEVGPFSTGQESPTAENARLLAQKRGALQGSAWQVSSEDVRWDTFPLGRMPGQTEDPAELMLENYDTMYLLDQPVLEQRLEPSTCKTDTLGLSCGVGSGNCSNSSSSNFEGLLWSQGQLHGLKTGLQLF

SEQ ID NO: 6212 - DNA, 732 bp, Homo sapiens
atgaacagcccggacctccgtcgtcccgcggcgaccaaaatctccgctggccgcaccgctgtgactactccggactcgccggcagagtttgcccgccggggagggtggccgattggcggagcgcactcctgctgtttctcccaccatctcgtggatgtcgtccctcgggtggtgagagaactttgcagtgggctggagcgccctttgcggagaagcacacgaagttggaaattgaccggagaattgagttgccggggaacagagccccggccgccgccagcgcgatgttcccgcagagccggcacccgacgccgcaccaggctgcaggccagcccttcaagttcagtatcgcggagtccctggaccggattaaagaggaattccagttcctgcaggcgcagtatcacagccttaaattggaatgaacatcaacaacaggtggcccaggctgtcgaacgtgccaaacaggtgaccatggcagagttgaatgccatcatcgggcagcagcagttgcaagctcagcatctttcttatggccacggacccccagttccccttacgcctcacccttcgggacttcagcctcctggaatcccgcccctcgggggcagtgccggtcttcttgcactgtctagtgctctgagtgggcaatctcacttggcaataaaagatgacaagaagcatcaagatgcagagcaccacagagatgagaggcccggcaagccagattag

SEQ ID NO: 6213 - protein, 243 aa, Homo sapiens [sequence omitted]

SEQ ID NO: 6214 - DNA, 3813 bp, Homo sapiens
ctgatctcggggattcgggtgcggagcccttggcctggaggcgatatgggtggtccgtggcccggttcagtcgcttgcagcagcccggggaacaggcctgtctggccctgagggagtcccctttctgaagctgtggtgcttggacgacctgctctctacattgctgggcacctgtaggtgtccctcgagagctcagttttgaggttcaagtcagtgtggccatgaaggggctgcctattgggctgatgctgtgaccctggagtctgcctctcctgccagtccccctgcccggaacatgtggctgcggcttggcccgccctcgctgtccctgagccccaagcccacggttggcaggagcctgtgcctcaccctgtggttcctcagtttggcgctgagggccagtacccaggccccagcacccacagtcaacactcactttgggaagctaaggggtgcccgagtaccactgcccagtgagatcctggggcctgtggaccaatacctgggggtgccctacgcagctcccccgatcggcgagaaacgtttcctgccccctgaaccacccccatcctggtcgggcatccggaacgccacacactttcccccagtgtgcccccagaacatccacacagctgtgcccgaagtcatgctgccggtctggttcactgccaacttggatatcgtcgctacttacatccaggagcccaacgaagactgtctctacctgaacgtctatgtgccgacggaggatggatccggcgctaagaaacagggcgaggacttagcggataatgacggggatgaagatgaagacatccgggacagtggtgctaaacccgtcatggtctacatccacggaggctcttacatggaagggacaggcaacatgattgatggcagcatccccgccagttatggcaatgtcatagtcatcaccctcaactatcgggttggagtgctaggtttcctgagtactggagatcaggctgccaagggcaactatgggctccttgaccagatccaggccctccgctgggtgagcgagaatattgccttcttcgggggagacccccgccggatcactgtctttggctcgggcattggtgcatcctgcgtcagcctcctcacgttgtcacatcactcagagggacttttccagagagccatcatccaaagtggctctgctctgtccagctgggctgtgaactaccaaccagtgaagtacaccagcctgctggcagacaaagtgggctgtaatgtgctggacaccgtggatatggtggactgtcttcggcaaaagagtgccaaggagctggtagagcaggacatccagccagcccgctaccacgtggcctttggccctgtgattgatggtgatgtcattcctgatgaccctgagatcctcatggagcagggcgagttcctcaactatgacatcatgctaggtgtcaaccagggcgagggtctcaagtttgtggaaggggtggtggaccctgaggatggtgtctctggcactgactttgactattccgtctccaattttgtggacaatctgtatggctatcctgagggtaaggacaccctgcgagagaccatcaagttcatgtatacagactgggcagaccgtgacaaccctgagacccgccgtaaaacactggtggcactcttcactgaccaccagtgggtggagccctcagtggtgacagccgatctgcatgcccgctacggctcgcctacctacttctacgccttctatcatcactgccagagcctcatgaagcctgcttggtcagatgcagctcatggggatgaagtaccctatgtttttggggttcctatggtaggccccactgaccttttcccctgcaacttctccaagaatgatgttatgctcagtgctgtcgtcatgacctattggaccaactttgccaagactggggatcccaacaagccggtcccccaggacaccaagttcattcacaccaaggccaaccgctttgaggaagtggcctggtccaaatacaatccccgagaccagctctaccttcacatcgggctgaaaccaagggtccgagatcattaccgggccactaaggtggccttttggaaacatctggtgccccacctatacaacctgcatgacatgttccactatacgtccaccaccaccaaagtgccgcctccggataccacccacagctcccacatcacccgcaggcccaatggcaagacctggagcaccaagcggccagccatctcacctgcctacagcaacgagaatgcccaggggtcctggaacggggaccaggatgcagggccactcctggtggagaaccctcgtgactactccactgaattaagtgtcaccatcgccgtgggggcctccctcctgttccttaacgttctggccttcgctgccctctactaccgtaaggacaaacggcgccaggagcccctgcggcagcctagccctcagcggggagccggggccccggagttgggagctgctccagaggaggagctggcagcattacaactgggccccacccaccacgagtgtgaggccggtcccccccatgacacgctgcgcctcactgcattgcccgactacaccctgaccctgcggcgctccccggatgacatcccactcatgacccccaacaccatcactatgatccccaactccctggtagggctgcagacattgcacccctataacacctttgccgcagggttcaacagtaccgggctgccccactcacactccactacccgggtatagctccaactcagagcacagccaatctccaggctccctccctcccagatccaggaacacatgcacacacacacacacacacacgcagacacacacacacacacacatatatgtatacgcacgcacccacaccctacagcagatccacctgcacaaacatagacagatgtggacatgcacccgcatgtacaaaaacacaaatacggaagtaaacctgaacaaaccctttaaatggggacgcagatgagtcctcggtaaaccgaggacccatgaaacagcagctgaagccagctccctgaatctgaccacagacactcctggggggcctgaaagcaacagctggacacccccttggtgctcgccttcggcctctcttggaactgcaccaccgaccaactccagacttgggagctttaaagagcaggatagctcttcctccccaggacttggtcttttttctgggtcttgttttgttgatttttcttttttaattttggaacaaatgcttttccaacccatgagtgctaagagcctctggaagggagggcttcaggcccgaaggtctctctggctctaggacccccagtgctcacacaatcagaccaaggaacaagacccccaggaaggaaacagatttaagcaagaccatggggtggaaggagaaaggggctagcactggatggagctggagggtcgtaggggagagatctccaactctctctgtgtccgtgtggagggctgcagagcctgcagggtgacctgcttccccaaaggccaacagcattggcctggccagaccaggtgaccttagatttggtgaacaacgtactatggaagccacatcactattgggcccccaggtctgatctgggttttgcctctgcccttggggaaatgctatcagaaattcgccccattttctttacagtcttttgtgtctgtcatttctctttcaaaaaggcggtgttttttgttgttgttggtttttttttttttttaaagaaaagttcttaaaacactaacgaaaaaaaaaa

SEQ ID NO: 6215 - protein, 828 aa, Homo sapiens
MWLRLGPPSLSLSPKPTVGRSLCLTLWFLSLALRASTQAPAPTVNTHFGKLRGARVPLPSEILGPVDQYLGVPYAAPPIGEKRFLPPEPPPSWSGIRNATHFPPVCPQNIHTAVPEVMLPVWFTANLDIVATYIQEPNEDCLYLNVYVPTEDGSGAKKQGEDLADNDGDEDEDIRDSGAKPVMVYIHGGSYMEGTGNMIDGSIPASYGNVIVITLNYRVGVLGFLSTGDQAAKGNYGLLDQIQALRWVSENIAFFGGDPRRITVFGSGIGASCVSLLTLSHHSEGLFQRAIIQSGSALSSWAVNYQPVKYTSLLADKVGCNVLDTVDMVDCLRQKSAKELVEQDIQPARYHVAFGPVIDGDVIPDDPEILMEQGEFLNYDIMLGVNQGEGLKFVEGVVDPEDGVSGTDFDYSVSNFVDNLYGYPEGKDTLRETIKFMYTDWADRDNPETRRKTLVALFTDHQWVEPSVVTADLHARYGSPTYFYAFYHHCQSLMKPAWSDAAHGDEVPYVFGVPMVGPTDLFPCNFSKNDVMLSAVVMTYWTNFAKTGDPNKPVPQDTKFIHTKANRFEEVAWSKYNPRDQLYLHIGLKPRVRDHYRATKVAFWKHLVPHLYNLHDMFHYTSTTTKVPPPDTTHSSHITRRPNGKTWSTKRPAISPAYSNENAQGSWNGDQDAGPLLVENPRDYSTELSVTIAVGASLLFLNVLAFAALYYRKDKRRQEPLRQPSPQRGAGAPELGAAPEEELAALQLGPTHHECEAGPPHDTLRLTALPDYTLTLRRSPDDIPLMTPNTITMIPNSLVGLQTLHPYNTFAAGFNSTGLPHSHSTTRV

SEQ ID NO: 6216 - DNA, 1549 bp, Homo sapiens
ctctgggaaagggcagcagcagccaggtgtggcagtgacagggaggtgtgaatgaggcaggatgaactggacaggtttgtacaccttgctcagtggcgtgaaccggcattctactgccattggccgagtatggctctcggtcatcttcatcttcagaatcatggtgctggtggtggctgcagagagtgtgtggggtgatgagaaatcttccttcatctgcaacacactccagcctggctgcaacagcgtttgctatgaccaattcttccccatctcccatgtgcggctgtggtccctgcagctcatcctagtttccaccccagctctcctcgtggccatgcacgtggctcaccagcaacacatagagaagaaaatgctacggcttgagggccatggggaccccctacacctggaggaggtgaagaggcacaaggtccacatctcagggacactgtggtggacctatgtcatcagcgtggtgttccggctgttgtttgaggccgtcttcatgtatgtcttttatctgctctaccctggctatgccatggtgcggctggtcaagtgcgacgtctacccctgccccaacacagtggactgcttcgtgtcccgccccaccgagaaaaccgtcttcaccgtcttcatgctagctgcctctggcatctgcatcatcctcaatgtggccgaggtggtgtacctcatcatccgggcctgtgcccgccgagcccagcgccgctccaatccaccttcccgcaagggctcgggcttcggccaccgcctctcacctgaatacaagcagaatgagatcaacaagctgctgagtgagcaggatggctccctgaaagacatactgcgccgcagccctggcaccggggctgggctggctgaaaagagcgaccgctgctcggcctgctgatgccacataccaggcaacctcccatcccacccccgaccctgccctgggcgagcccctccttctcccctgccggtgcacaggcctctgcctgctggggattactcgatcaaaaccttccttccctggctacttcccttcctcccggggccttccttttgaggagctggaggggtggggagctagaggccacctatgccagtgctcaaggttactgggagtgtgggctgcccttgttgcctgcacccttccctcttccctctccctctctctgggaccactgggtacaagagatgggatgctccgacagcgtctccaattatgaaactaatcttaaccctgtgctgtcagataccctgtttctggagtcacatcagtgaggagggatgtgggtaagaggagcagagggcaggggtgctgtggacatgtgggtggagaagggagggtggccagcactagtaaaggaggaatagtgcttgctggccacaaggaaaaggaggaggtgtctggggtgagggagttagggagagagaagcaggcagataagttggagcaggggttggtcaaggccacctctgcctctagtccccaaggcctctctctgcctgaaatgttacacattaaacaggattttacagt

SEQ ID NO: 6217 - protein, 283 aa, Homo sapiens
MNWTGLYTLLSGVNRHSTAIGRVWLSVIFIFRIMVLVVAAESVWGDEKSSFICNTLQPGCNSVCYDQFFPISHVRLWSLQLILVSTPALLVAMHVAHQQHIEKKMLRLEGHGDPLHLEEVKRHKVHISGTLWWTYVISVVFRLLFEAVFMYVFYLLYPGYAMVRLVKCDVYPCPNTVDCFVSRPTEKTVFTVFMLAASGICIILNVAEVVYLIIRACARRAQRRSNPPSRKGSGFGHRLSPEYKQNEINKLLSEQDGSLKDILRRSPGTGAGLAEKSDRCSAC

SEQ ID NO: 6218 - DNA, 701 bp, Homo sapiens
gtgtgaatgaggcaggatgaactggacaggtttgtacaccttgctcagtggcgtgaaccggcattctactgccattggccgagtatggctctcggtcatcttcatcttcagaatcatggtgctggtggtggctgcagagagtgtgtggggtgatgagaaatcttccttcatctgcaacacactccagcctggctgcaacagcgtttgctatgaccaattcttccccatctcccatgtgcggctgtggtccctgcagctcatcctagtttccaccccagctctcctcgtggccatgcacgtggctcaccagcaacacatagagaagaaaatgccaaggcctctctctgcctgaaatgttacacattaaacaggattttacagtaaatgaagaggtggcttgtgtgtttgtcaagttctttctcctgcaacctctgacctcccccaggatgagctggccttggttttttactgattaagaaaggaacagggcaaaagaagtagttacttgagtagctgaagctgcaaatgaggaaatcactgtacttctgggccgcagagccagccccggagccattcctccctgttgcttttgttgttgtggttcttgtctttttcattgtctaataacagctttattgggatttagtttacatacctccttcctctgattttgaaaagattaaaaatgacaactccctctg

SEQ ID NO: 6219 - protein, 111 aa, Homo sapiens
MNWTGLYTLLSGVNRHSTAIGRVWLSVIFIFRIMVLVVAAESVWGDEKSSFICNTLQPGCNSVCYDQFFPISHVRLWSLQLILVSTPALLVAMHVAHQQHIEKKMPRPLSA

SEQ ID NO: 6220 - DNA, 2324 bp, Homo sapiens
taattctaaatggtggtaggaggagaacaggcattgctttcacagcccctgggggcctacctcagtttgctatagatagcagtctttttttttttggagacagagtttccctcttgttgcccaggctagagtgcaatggcatggtcttggctcactgcaacctccacctcccgggttcaagcgagtctcctgcctcagcctcccgagtagctgggactacaggtgcttgccaccatgcccggctaatttttgtatttttagtagagatggggttacaccatgttggccaggctggtctcgaactcctgacctcaggtgatccaccagcctcggcctcccaattttgtatttttattagagactgagtttgaccacgttggtcaggctgttcttgaactcctgacctcagataatctgcccgcctcggtttcccaaagtgctgggattactggcgtgagccaccaagcccggcccagatagcaatctttaggactgctggtatccattaaatgtaacctcaaggtctttatttttgaatcttgagcaaactcagtctctatacttaatctaggagttaagtaaatgccaccgtctgactggccagtctgattgactatgtttgttggagggaagtcaatgaaggctaggcattatcacataaaatagttgtgaatccaaatacttcatggctcatgcaatcctggggttgttttggttatggtgttaaaatgccaaaactggatagtttggttgtttctgtttttgtttttctttttttctttttctttttgagacagagttttgctcttgtcgcccaggctggagtgcagtggtgcaatcttggctccctgcaacctccgcctcccaggttcaagcgattctcctgcctcagcctcctgagtagctgggattacaggcatgcgccaccacttttggggttatccactagagttctaaacagacttagtcacccactcctacctaccatcaggagccttgaatagttgaatggaaatagcctccagtggagggactacagatgggtgggaagcttccaacaatggctctgttacagtgttgctctctttttctctttaagaccccaccaacaactgaacgctttggtcaggctgctacaatggaaggaattggggcaattggtggaactcctcctgcattcaaccgtgcagctcctggagctgaatttgccccaaacaaacgtcgccgatactaataagttgcagtgtctagtttctcaaaacccttaaaagaaggaccctttttggactagccagaattctaccctggaaaagtgttagggattccttccaatagttagatctaccctgcctgtactactctagggagtatgctggaggcagagggcaagggaggggtggtattaaacaagtcaattctgtgtggtatattgtttaatcagttctgtgtggtgcattcctgaagtctctaatgtgactgttgagggcctggggaaaccatggcaaagtggatccagttagagcccattaatcttgatcattccggttttttttttttttgtccatcttgtttcatttgcttgccccgcccccgagacggagtcttactctgtcgcccaggctggagtgtagtggcatgatctcggctcactgcaatctctgcctcccgggttcaagcttgtccaggttgatcttgaactcctgacctcgtgatctacccacctcggcctcccaaaatgctgggattacaggggtgagccaccgtgcccaacctcacttgcttcttatccttacactcccccagccccagagaaactgccacatacaccacaaaaaccaaacatcccccaatgaccttagccccattgctccattcactcccaggtgagaattcaggcaaacgtccacaaaggtcacaggcagcgtacatacggttctgttataccccatatattaccccttcatgtcctaaagaagacattttctcttagagattttcattttagtgtatctttaaaaaaaaatcttgtgttaacttgcctccatctttttcttgggtgaggacacccaggaatgacccttttgtgtctatgatgttgctgttcacagcttttcttgataggcctagtacaatcttgggaacagggttactgtatactgaaggtctgacagtagctcttagactcgcctatcttaggtagtcatgctgtgcattttttttttcattggtgtactgtgtttgatttgtctcatatatttggagtttttctgaaaaatggagcagtaatgcagcatcaacctattaaaatacattttaagcctttt

SEQ ID NO: 6221 - protein, 390 aa, Homo sapiens
MQSNKTFNLEKQNHTPRKHHQHHHQQQHHQQQQQQPPPPPIPANGQQASSQNEGLTIDLKNFRKPGEKTFTQRSRLFVGNLPPDITEEEMRKLFEKYGKAGEVFIHKDKGFGFIRLETRTLAEIAKVELDNMPLRGKQLRVRFACHSASLTVRNLPQYVSNELLEEAFSVFGQVERAVVIVDDRGRPSGKGIVEFSGKPAARKALDRCSEGSFLLTTFPRPVTVEPMDQLDDEEGLPEKLVIKNQQFHKEREQPPRFAQPGSFEYEYAMRWKALIEMEKQQQDQVDRNIKEAREKLEMEMEAARHEHQVMLMRQDLMRRQEELRRMEELHNQEVQKRKQLELRQEEERRRREEEMRRQQEEMMRRQQEGFKGTFPDAVYLPCARDVPDQS

SEQ ID NO: 6222 - DNA, 1743 bp, Homo sapiens
gccagatctggaaggtggctgcggaacggttttaagcggaagatggaggagccggaggaaccggcggacagtgggcagtcgctggtcccggtttatatctatagtcccgagtatgtcagtatgtgtgactccctggccaagatccccaaacgggccagtatggtgcattctttgattgaagcatatgcactgcataagcagatgaggatagttaagcctaaagtggcctccatggaggagatggccaccttccacactgatgcttatctgcagcatctccagaaggtcagccaagagggcgatgatgatcatccggactccatagaatatgggctaggttatgactgcccagccactgaagggatatttgactatgcagcagctataggaggggctacgatcacagctgcccaatgcctgattgacggaatgtgcaaagtagcaattaactggtctggagggtggcatcatgcaaagaaagatgaagcatctggtttttgttatctcaatgatgctgtcctgggaatattacgattgcgacggaaatttgagcgtattctctacgtggatttggatctgcaccatggagatggtgtagaagacgcattcagtttcacctccaaagtcatgaccgtgtccctgcacaaattctccccaggatttttcccaggaacaggtgacgtgtctgatgttggcctagggaagggacggtactacagtgtaaatgtgcccattcaggatggcatacaagatgaaaaatattaccagatctgtgaaagtgtactaaaggaagtataccaagcctttaatcccaaagcagtggtcttacagctgggagctgacacaatagctggggatcccatgtgctcctttaacatgactccagtgggaattggcaagtgtcttaagtacatccttcaatggcagttggcaacactcattttgggaggaggaggctataaccttgccaacacggctcgatgctggacatacttgaccggggtcatcctagggaaaacactatcctctgagatcccagatcatgagtttttcacagcatatggtcctgattatgtgctggaaatcacgccaagctgccggccagaccgcaatgagccccaccgaatccaacaaatcctcaactacatcaaagggaatctgaagcatgtggtctagttgacagaaagagatcaggtttccagagctgaggagtggtgcctataatgaagacagcgtgtttatgcaagcagtttgtggaatttgtgactgcagggaaaatttgaaagaaattacttcctgaaaatttccaaggggcatcaagtggcagctggcttcctggggtgaagaggcaggcaccccagagtcctcaactggacctaggggaagaaggagatatcccacatttaaagttcttatttaaaaaaacacacacacacaaatgaaatttttaatctttgaaaattatttttaagcgaattggggaggggagtattttaatcatcttaaatgaaacagatcagaagctggatgagagcagtcaccagtttgtagggcaggaggcagctgagaggcagggtttgggcctcaggaccatccaggtggagccctgggagagagggtactgatcagcagactgggaggtggggagaagtccgctggtgttgttttagtgttatatatctttggtttttttaataaaatctttgaaaacctaaaaaaaaaaaaaaaaaaaaaaaaaaaaaa

SEQ ID NO: 6223 - protein, 377 aa, Homo sapiens
MEEPEEPADSGQSLVPVYIYSPEYVSMCDSLAKIPKRASMVHSLIEAYALHKQMRIVKPKVASMEEMATFHTDAYLQHLQKVSQEGDDDHPDSIEYGLGYDCPATEGIFDYAAAIGGATITAAQCLIDGMCKVAINWSGGWHHAKKDEASGFCYLNDAVLGILRLRRKFERILYVDLDLHHGDGVEDAFSFTSKVMTVSLHKFSPGFFPGTGDVSDVGLGKGRYYSVNVPIQDGIQDEKYYQICESVLKEVYQAFNPKAVVLQLGADTIAGDPMCSFNMTPVGIGKCLKYILQWQLATLILGGGGYNLANTARCWTYLTGVILGKTLSSEIPDHEFFTAYGPDYVLEITPSCRPDRNEPHRIQQILNYIKGNLKHVV

SEQ ID NO: 6224 - DNA, 916 bp, Mus musculus
aagacggaggtcctctttccttgcctaacgcagccatggctcgtggtcccaagaagcatctgaagcgggtggcagctccaaagcattggatgctggataaattgaccggtgtgtttgctcctcgtccatccaccggtccccacaagttgagagagtgtctccccctcatcattttcctgaggaacagacttaagtatgccctgacaggagatgaagtaaagaagatttgcatgcagcggttcattaaaatcgatggcaaggtccgaactgatataacctaccctgctggattcatggatgtcatcagcattgacaagacgggagagaatttccgtctgatctatgacaccaagggtcgctttgctgtacatcgtattacacctgaggaggccaagtacaagttgtgcaaagtgagaaagatctttgtgggcacaaaaggaatccctcatctggtgactcatgatgcccgcaccatccgctaccccgatcccctcatcaaggtgaatgataccattcagattgatttggagactggcaagattactgatttcatcaagttcgacactggtaacctgtgtatggtgactggaggtgctaacctaggaagaattggtgtgatcaccaacagagagaggcaccctggatcttttgacgtggttcacgtgaaagatgccaatggcaacagctttgccactcgactttccaacatttttgttattggcaagggcaacaaaccatggatttctcttccccgaggaaagggtatccgcctcaccattgctgaagagagagacaaaagactggcggccaaacagagcagtgggtgaaatgggtccctgggtgacatgtcagatctttgtacgtaattaaaaatattgtggcaggattaatagcaaaaaaaaaaaaaaaaaaaaaa

SEQ ID NO: 6225 - protein, 263 aa, Mus musculus [sequence omitted]

SEQ ID NO: 6226 - DNA, 441 bp, Homo sapiens
atgggtccacgtcttgcagctacagctgctgcagctactcctgctgtccgcaccgttccacagtataaatatgctgcgggagtttgcaatcctcagcaacatcttaatgcacagccacaagttacagtgcaacagcctgctattcatgtacaaggtcaggaacctttgactgtttccatgttggcatctgcccctcaagagcaaaagcaaatgttgggtgaatggctgtttcctcttattcaagccatgcaccctactcttgccggtaaaatcactggcgtgttgttggagattgataattcagaacttcttcatatgctcaagtctccagagtcactccattctaaggttgatgaagctgtagctgtactacaagcccaccaagctaaagagactgcccagaaagcagttaacagtgccaccggtgttccaactgtttaa

SEQ ID NO: 6227 - DNA, 549 bp, Homo sapiens
gaaccgccatcttccagtaattcgccaaaatgacgaacacaaagggaaagaggagaggcacccaatatatgttctctaggccttttagaaaacatggagttgttcctttggccacgtatatgcaaatctataagaaaggtgatattgtagacatcaagggaatgggtactgttcaaaaaggaatgccccacaagtgttaccatggcaaaactggaagagtctacaatgttacccagcatactgttggcattgttgtaaacaaacaagttaagggcaagattcttgccaagagaattaatgtgcgtattgagcacattaagcactctaagagccgagatagcttcctgaaacgcatgaatgaaaatgatcagagaaagaaataagccaaagagaaaggtacctgtgttcaactaaagtgccagcctgctccacccagagaagcacactttgtgagaaccaatgggaaggagcctgagctgctggaacctattctctatgaatttatggcataataggtgttaaaaaataaataaaagacatctgggctgt

SEQ ID NO: 6228 - DNA, 1026 bp, Homo sapiens
atgagatctggttgttccctgggtatcaccaatgatgttacccagtccatggagattagttccaccttctgggtgttgggagtagttccagcactttccagagccttctctctcctgtgcaaaatagcaactcttaaggaaaaactcattgtaccagttgcggaagaagaggcaacagtccaaaacaataagatcactgtagtgagtgttggacaagttggtatggcgtgtgctatcagcattctgggaaaatctctggctgatgaatttgcttttgtggatgttttggaagataagcttaaaggagaaatgatggatctgcagcatgggagcttatttctcaagaagcttaaaattgtggcagataaagattattctgtgactgccagttataagattgtagtggtaacttcaggagtccttcagcaagagggggagaggcgggacattcttacgtatgttacctggaaaataagtggattactcaaacaccatgtgattggaagtggatgtaatccggattctgctagatttcactgccttatggatgaaaaatttggcattcatcccagcagctgccatggaaggattttgggggaacatagtgactcaagtgtggctgtgtggattggcatgaatgtgacaggtttttctctccaggaattgaatccagaaataggaactgacaatgatagtgaaaattggaaagaagtgcataagatggtggttgaaaatgcctatgaagtcaacaagctaaatggatatacccactgggatattggattaagtgtggctgatctcattgaatccatgttgaaaaatctatccaggattcatctcgtgtcaacaatggtaaaggggatgtatggcatcgagaatgaagtcttcctgagccttccatatatcctcaatgcccggggattaaccagcgttatcaaccagaagctaaaggatgatgaggttgctcagttcaagaaaagtacagataccccgtgggacatccagaaggacctaaaagacctgtga

SEQ ID NO: 6229 - DNA, 2232 bp, Homo sapiens
acttatagaagggagaggagcgaacatggcagcgcgttggcggttttggtgtgtctctgtgaccatggtggtggcgctgctcatcgtttgcgacgttccctcagcctctgcccaaagaaagaaggagatggtgttatctgaaaaggttagtcagctgatggaatggactaacaaaagacctgtaataagaatgaatggagacaagttccgtcgccttgtgaaagccccaccgagaaattactccgttatcgtcatgttcactgctctccaactgcatagacagtgtgtcgtttgcaagcaagctgatgaagaattccagatcctggcaaactcctggcgatactccagtgcattcaccaacaggatattttttgccatggtggattttgatgaaggctctgatgtatttcagatgctaaacatgaattcagctccaactttcatcaactttcctgcaaaagggaaacccaaacggggtgatacatatgagttacaggtgcggggtttttcagctgagcagattgcccggtggatcgccgacagaactgatgtcaatattagagtgattagacccccaaattatgctggtccccttatgttgggattgcttttggctgttattggtggacttgtgtatcttcgaagaagtaatatggaatttctctttaataaaactggatgggcttttgcagctttgtgttttgtgcttgctatgacatctggtcaaatgtggaaccatataagaggaccaccatatgcccataagaatccccacacgggacatgtgaattatatccatggaagcagtcaagcccagtttgtagctgaaacacacattgttcttctgtttaatggtggagttaccttaggaatggtgcttttatgtgaagctgctacctctgacatggatattggaaagcgaaagataatgtgtgtggctggtattggacttgttgtattattcttcagttggatgctctctatttttagatctaaatatcatggctacccatacagctttctgatgagttaaaaaggtcccagagatatatagacactggagtactggaaattgaaaaacgaaaatcgtgtgtgtttgaaaagaagaatgcaacttgtatattttgtattacctctttttttcaagtgatttaaatagttaatcatttaaccaaagaagatgtgtagtgccttaacaagcaatcctctgtcaaaatctgaggtatttgaaaataattatcctcttaaccttctcttcccagtgaactttatggaacatttaatttagtacaattaagtatattataaaaattgtaaaactactactttgttttagttagaacaaagctcaaaactactttagttaacttggtcatctgattttatattgccttatccaaagatggggaaagtaagtcctgaccaggtgttcccacatatgcctgttacagataactacattaggaattcattcttagcttcttcatctttgtgtggatgtgtatactttacgcatctttccttttgagtagagaaattatgtgtgtcatgtggtcttctgaaaatggaacaccattcttcagagcacacgtctagccctcagcaagacagttgtttctcctcctccttgcatatttcctactgcgctccagcctgagtgatagagtgagactctgtctcaaaaaaaagtatctctaaatacaggattataatttctgcttgagtatggtgttaactaccttgtatttagaaagatttcagattcattccatctccttagttttcttttaaggtgacccatctgtgataaaaatatagcttagtgctaaaatcagtgtaacttatacatggcctaaaatgtttctacaaattagagtttgtcacttattccatttgtacctaagagaaaaataggctcagttagaaaaggactccctggccaggcgcagtgacttacgcctgtaatctcagcactttgggaggccaaggcaggcagatcacgaggtcaggagttcgagaccatcctggccaacatggtgaaaccccgtctctactaaaaatataaaaattagctgggtgtggtggcaggagcctgtaatcccagctacacaggaggctgaggcacgagaatcacttgaactcaggagatggaggtttcagtgagccaagatcacaccactgcactccagcctggcaacagagcgagactccatctcaaaaaaaaaaaaaaaa

SEQ ID NO: 6230 - DNA, 1767 bp, Homo sapiens
aagcctccggagcgcacgtcggcagtcggctccctcgttgaccgaatcaccgacctctctccccagctgtatttccaaaatgtcgctttctaacaagctgacgctggacaagctggacgttaaagggaagcgggtcgttatgagagtcgacttcaatgttcctatgaagaacaaccagataacaaacaaccagaggattaaggctgctgtcccaagcatcaaattctgcttggacaatggagccaagtcggtagtccttatgagccacctaggccggcctgatggtgtgcccatgcctgacaagtactccttagagccagttgctgtagaactcaaatctctgctgggcaaggatgttctgttcttgaaggactgtgtaggcccagaagtggagaaagcctgtgccaacccagctgctgggtctgtcatcctgctggagaacctccgctttcatgtggaggaagaagggaagggaaaagatgcttctgggaacaaggttaaagccgagccagccaaaatagaagctttccgagcttcactttccaagctaggggatgtctatgtcaatgatgcttttggcactgctcacagagcccacagctccatggtaggagtcaatctgccacagaaggctggtgggtttttgatgaagaaggagctgaactactttgcaaaggccttggagagcccagagcgacccttcctggccatcctgggcggagctaaagttgcagacaagatccagctcatcaataatatgctggacaaagtcaatgagatgattattggtggtggaatggcttttaccttccttaaggtgctcaacaacatggagattggcacttctctgtttgatgaagagggagccaagattgtcaaagacctaatgtccaaagctgagaagaatggtgtgaagattaccttgcctgttgactttgtcactgctgacaagtttgatgagaatgccaagactggccaagccactgtggcttctggcatacctgctggctggatgggcttggactgtggtcctgaaagcagcaagaagtatgctgaggctgtcactcgggctaagcagattgtgtggaatggtcctgtgggggtatttgaatgggaagcttttgcccggggaaccaaagctctcatggatgaggtggtgaaagccacttctaggggctgcatcaccatcataggtggtggagacactgccacttgctgtgccaaatggaacacggaggataaagtcagccatgtgagcactgggggtggtgccagtttggagctcctggaaggtaaagtccttcctggggtggatgctctcagcaatatttagtactttcctgccttttagttcctgtgcacagcccctaagtcaacttagcattttctgcatctccacttggcattagctaaaaccttccatgtcaagattcagctagtggccaagagatgcagtgccaggaacccttaaacagttgcacagcatctcagctcatcttcactgcaccctggatttgcatacattcttcaagatcccatttgaattttttagtgactaaaccattgtgcattctagagtgcatatatttatattttgcctgttaaaaagaaagtgagcagtgttagcttagttctcttttgatgtaggttattatgattagctttgtcactgtttcactactcagcatggaaacaagatgaaattccatttgtaggtagtgagacaaaattgatgatccattaagtaaacaataaaagtgtccattg

SEQ ID NO: 6231 - protein, 417 aa, Homo sapiens
MSLSNKLTLDKLDVKGKRVVMRVDFNVPMKNNQITNNQRIKAAVPSIKFCLDNGAKSVVLMSHLGRPDGVPMPDKYSLEPVAVELKSLLGKDVLFLKDCVGPEVEKACANPAAGSVILLENLRFHVEEEGKGKDASGNKVKAEPAKIEAFRASLSKLGDVYVNDAFGTAHRAHSSMVGVNLPQKAGGFLMKKELNYFAKALESPERPFLAILGGAKVADKIQLINNMLDKVNEMIIGGGMAFTFLKVLNNMEIGTSLFDEEGAKIVKDLMSKAEKNGVKITLPVDFVTADKFDENAKTGQATVASGIPAGWMGLDCGPESSKKYAEAVTRAKQIVWNGPVGVFEWEAFARGTKALMDEVVKATSRGCITIIGGGDTATCCAKWNTEDKVSHVSTGGGASLELLEGKVLPGVDALSNI

SEQ ID NO: 6232 - DNA, 1778 bp, Homo sapiens
ctccctgcctccgcgctgcagcccctgccgtagccgcccctgagcccgccaccaccgcctctgagcagaagatggctgtgccacctacgtatgctgatcttggcaaatctgccagggatgtcttcactgagggctatggatttggcttaataaagcttgatttgaaaacaaaatatgagaatggattggaatttacaagctcaagctcagccaacacagaccaccaaagtgacgggcagtctggaaaccaagtacagatggactgagtacggcctcacgtttacagagaaatggaacaccgacaatacactaggcaccaagattactgtggaagatcagcttgcacgtggactgaagctgaccttcgattcatccttttcacctaacactgggaaaaaaaatgctaaaatcaagacagggtacaagcgggagcacattaacctgggctgcgacatggttttcgacattgttgggccttccatccggggtgctctggtgctgggttacgagggctggctggccggctatcagatgaattttgagactacaaaatcccgagtgacccagagcaactttgcaattggctacaagactgatgaattccagcttcacacaaatgtgaatgacgggacagagtttggcggctccatttaccagaaagtgaacaagaagttggagaccaccgtcaatcttgcctggacagcaggaaacagtaacacgcgcttcggaatagcagccaagtatcagattgaccctgacgcctgcttctcggctaaagtgaacaactccagcctgataggtttaggatacactcagactctaaagccaggtatcaaactgacactgtcagctcttctggatggcaagaacgtcaatgctggtggccacaagcttggtctaggactggaatttcaagcataaatgaatactgtacaattgtttaattttaaactattttgcagcatagctaccttcagaatttagtgttatcttttaatgttgtatgtctgggatgcaagtattgctaaatatgttacccctccaggttaaagatgattcagctttaagatgttacccttccagaggtacagaagaaacgcatttccaaaaaaggttctttcagtggtagactcggggagaacttggtggcccctttgaggtgccaggtttctttttcatctagagatggctgcgagtggaagctgataatatgtaggcactttgtaaattcatattgagtaaatgaatgaaattgtgatttcctgagaatcgaaccatggtttcctaaccctaattgatgagaggctcgctgcttgatggtgtgtacaagctcacctgaatgggacttttttagacagatcttcatgacctgttcccaccccagttcatcatcatctcttttacaccaaaaggtctgcagggtgtggtcactctttcttttgtgccattttggggtggagaaggtagatgtgatgaaaccaataattcaggacttattccttcttgtgttgtgtttttttttgcccttgcaccagagtatgaaatagcttccaggagctccagctataagcttgggagtgtctgtgtgattgtaatcacatggtgacagcactcagaatctaaattggacttctgctgtattctcaccactcaatttgttttttagcaatttaatggctacattttagagtcttccattttttgtggaattagatcctccccttcaaatgctgtaattaacatcacttaagaaaacttgaataaaatgttgaaacctc

SEQ ID NO: 6233 - DNA, 1741 bp, Homo sapiens
tagctggattccagccattgctgcagctgctccacagcccttttcaggacccaaacaaccgcagccgctgttcccaggatggtgatccgtgtatatattgcatcttcctctggctctacagcgattaagaagaaacaacaagatgtgcttggtttcctagaagccaacaaaataggatttgaagaaaaagatattgcagccaatgaagagaatcggaagtggatgagagaaaatgtacctgaaaatagtcgaccagccacaggttaccccctgccacctcagattttcaatgaaagccagtatcgcggggactatgatgccttctttgaagccagagaaaataatgcagtgtatgccttcttaggcttgacagccccacctggttcaaaggaagcagaagtgcaagcaaagcagcaagcatgaaccttaagcactgtgctttaagcatcctgaaaaatgagtctccattgcttttataaaatagcagaattagctttgcttcaaaagaaataggcttaatgttgaaataatagattagttgggttttcacatgcaaacattcaaaatgaatacaaaattaaaatttgaacattatggtgattatggtgaggagaatgggatattaacataaaattatattaataagtagatatcgtagaaatagtgttgttacctgccaagccatcctgtatacaccaatgattttacaaagaaaacacccttccctccttctgccattactatggcaacttaagtgtatctgcagctctacattaaaaaggagaaagagaaataacctgtctctcattcctaagttgcctcattaattttcatgaacaagaatatgtacctttttgatgctatattactgcgattaaaaagttcttgcaggtaatgtttatgatatgttaaacgttgtaatttcctatcgtaattataacattcccattcttttgtagatgaaacttctacatattgaaccacagattttctgagcttctaaatgtagcctttcattgcacatttcagtgatcagaatagatatccttttacacgcacaaaagcaatagattcattcagtggacaagttccttgtttaactacacagctatgatggaatgatatatccaagttccttgcctcagtgaaatatgcatatgtatatcatgaaagtgggatgccaagtaagcttaaaatggcattctctagcaaagagattagacttttaaataactcttataaaacaggttggcgatcatttcccaagattggtttcccttgagtttttgctaaaacaaatcttagtagttttgcccgtttaaaacaactcacaatcgtaaatgctactattcctaagatatcttacctttttatttcagtttagccatgtattgtatgagtgtattagtctaagcagtgagaatcttttctatgcctctattccagcaaaaagtagaagtatcaaataaaaagggcaacttttaaaatattaagcctgaagacttctaaaaagacaagaaacatggcctaaataaccaacatagatttacatagtaagtttcacactaccttattaccaaaagcaaacacctcttactttaaactacattatcatgtatatctattgtatgctggtctttactttttgccaaaatcaacatataatgaagagatgcctttgtttcatgagattcaaacttgatgctatgctttaaaataaactcagtacttttagaaacat

SEQ ID NO: 6234 - protein, 114 aa, Homo sapiens
MVIRVYIASSSGSTAIKKKQQDVLGFLEANKIGFEEKDIAANEENRKWMRENVPENSRPATGYPLPPQIFNESQYRGDYDAFFEARENNAVYAFLGLTAPPGSKEAEVQAKQQA

SEQ ID NO: 6235 - DNA, 1030 bp, Homo sapiens
tttccgcactacctacagaggggtccatagggggttgttctagattcccgtcgtaacttaaagggaaactttcacaatgtccggagcccttgatgtcctgcaaatgaaggaggaggatgtccttaagttccttgcagcaggaacccacttaggtggcaccaatcttgacttccagatggaacagtacatctataaaaggaaaagtgatggcatctatatcataaatctgaagaggacctgggagaagcttctgctgacagctcgtgctattgttgccattgaaaaccctgctgatgtcagtgttatatcctccaggaatactggccagagggctgtgctgaagtttgctgctgccactggagccactccaattgctggccgcttcactcctggaaccttcactaaccagatccaggcagccttccgggagccacggcttcttgtggttagtgaccccagggctgaccaccagcctctcacggaggcatcttatgttaacctacctaccattgctctgtgtaacacagattctcctctgcactatgtggacattgccatcccatgcaacaacaagggaactcactcagtgggtttgatgtggtggatgctggctcgggaagttctgcgcatgcgtggcaccatttcccgtgaacacccatgggaggtcatgcctgatctctacttctacagagatcctgaagagattgaaaaagaagagcaggctgctgctgaaaaggcaatgaccagggaggaacttcagggtgaatggactgctccagctcctgagttcactgctactcagcctgaggttgcagactggtctgaaggtgtacaggtgccctctgtgcctattcagcagttccctactgaagactggagcactcagcgtgccacggaagactggtctgcagctcccactgctcaggccactgaatgggtaggagcaaccactgactggtcttaagctgttcttgcataggctcttaagcagcatggaaaaatggttgatggaaaataaacatcagtttct

SEQ ID NO: 6236 - protein, 295 aa, Homo sapiens
MSGALDVLQMKEEDVLKFLAAGTHLGGTNLDFQMEQYIYKRKSDGIYIINLKRTWEKLLLTARAIVAIENPADVSVISSRNTGQRAVLKFAAATGATPIAGRFTPGTFTNQIQAAFREPRLLVVSDPRADHQPLTEASYVNLPTIALCNTDSPLHYVDIAIPCNNKGTHSVGLMWWMLAREVLRMRGTISREHPWEVMPDLYFYRDPEEIEKEEQAAAEKAMTREELQGEWTAPAPEFTATQPEVADWSEGVQVPSVPIQQFPTEDWSTQRATEDWSAAPTAQATEWVGATTDWS

SEQ ID NO: 6237 - DNA, 1303 bp, Homo sapiens
gatcatgtctgtaagccaggattcctgatccagagacaatggccccgatgggatggagcccgaaggcgtcatcgagagtaactggaatgagattgttgacagctttgatgacatgaacctctcggagtcccttctccgtgacatctatgcctatggttttgagaagccctctgccatccagcagcaagccattctaccttgtatcaggggttataatgtaatcgctcaagcctgatctgggactgggaaaatggccacatttgccatatcgattctgcagcagattgcattagatctaaaagccacccaggccttggtcctagcacccactcgagaattggctcagcagatacagaaggtggtcatggcactagtagactacatgggtgcctcctgtcatgcctgtatcaggggcaccaatgtgcgtgctgaggtgcagaaactgcagatggaagctccccacatcatcgtgggtacccctagctgtgtgtttgatatgcttaaccggagatacctatctcccaaatacatcaagatgtttgtactggatgaagctgacgaaatgttaagccgtggattcaaggaccagatctatgacatattccaaaagctcaacagcaacacccaggtagttttgctgtcagctacaatgccttctgatgtgcttgaggtgatcaagaagttcatgagggaccccattcggattcttgtcaagaaggaagagttgaccctggagggtatccgccaattctacatcaacgtggaacgagaggagtggaagctggacacactatgtgacttgtatgaaaccctgaccatcacccaggcagtcatcttcatcaatacccggaggaaggtggactggctcaccgagaagatgcatgctcgagatttcactgtctccgccatgcatggagatatggaccaaaaggagcgagacgtgatcacgagggagtttcgttctggctctagcagagttttgattaccactgacctgctgggaaaactatatccacagaatcagtcgaggtggacagtttggccgtaaagatgtggctattaacatggtgacagaagaagacaagaggactcttcgagacattgagaccttctacaacacctccattgaggaaatgcccccaatgttgctgacctcatctgaggggctgtcctgccacccagccccagccagggctcaatctcggggggctgaggagcagcaggagaggggaaggaagggagccaagggatagacatcttgtcattttttttctttgaataaatgtcactttttgaggcaaaa

SEQ ID NO: 6238 - DNA, 1392 bp, Homo sapiens
tcgtcggcaaagcctgagtcctgtcctatctctctcctccccggacagcatgagcttcaccactcggtccaccttctccaccaactaccagtcactgggctctgtccaggcgcccagctacggcgcccggccggtcagcagcgcggccagcgtctatgcaggcgccgggggctctggttcccggatctccgtgtcccgctccaccagcttccggggtggcatggggcctgggggcctggccgcggggatggctgggggtctggcaggaatgggaggcatccagaacaagaagaccatgcaaagcctgaacgaccgcctggcctcttacctggacagagtgaggagcctggagactgagaaccgtaggctggagagcaaaatccgggagcacttggagaataagggaccccaggtcaaagactggagccattactgcaagaccatcgaggacctgagggctcagatcttcgcaaatactgtggacaatgcctgcatcgttctgcatattgacaatgcccgtcttgctgctgatgactttagagtcaagtatgagacacagctggcgatgcgccagtctgtggagaacgacatccatgggctccgcaaggtcattgatgacaccaatgtcacttgactgcagctggagacagagattgaggctctcagggaggagctgctcttcatgaagaaccacgaagaggaagtaaaaggcctacaagcccagattgccagctttaggttgaccgtggaggtagatgcccccaaatctcaggacctcgccaagatcatggcagacatccgggcccaatatgacgacctggctgggaagaaccgagaggagctagacaaatactggcctcagcagtttgaggagaacaccacagtggtcaccacagtccgccgaggttggagctgctgagatgacgctcacagagctgagacgtacagtccagtccttggagatcgacctggactccatgagaaatctgaaggccagcttggagaacaacccgagggaggtggaggcccgctactccctacagatggtgcagctcatcgggatcctgctgcacctggagtcagagctggcacagacccgggcagagagacagtgccaggcccaggagtaatgaggccctgctgaacatcaaggtcaagctggaggctgagatcgccacctaccgccgcctgctggaagatggcgaggacttcactcttggtgatgccttggacagcaggaactccatgcaaaccatccaaaagaccaccacccgccggaaagtggatggcaaagtggtgtctgagaccaacaacaccaaagttctgaggcattaagccagcagaagcagggtaccctttggggagcaggaggccaataaaaagtacagagtt

SEQ ID NO: 6239 - DNA, 1978 bp, Homo sapiens
cggaagccgactcaacagagctatggcgggtttgactgtgagagacccagcggtggatcgttctctacgttctgtgttcgtggggaacattccttatgaagctactgaagagcagttgaaggacatcttttctgaggttggacctgttgttagtttcagattggtatacgatagagagacaggaaagccaaagggttatggcttctgtgaataccaagaccaagagacagcacttagtgccatgcggaacctgaatgggcgcgaattcagtgggagagcacttcgagtggacaatgctgccagtgaaaagaacaaagaagagctgaagagccttggcactggtgcccctgtcattgagtcaccttatggagagaccatcagtcctgaggatgcccctgagtccattagcaaagcagttgccagccttccaccagagcagatgtttgagctgatgaaacaaatgaagctctgtgtccagaatagtccccaggaggcacggaacatgttacttcagaaccctcaactggcttatgctttgctgcaagcacaggtagtgatgagaattgtggatccggaaattgccctgaaaattctgcatcgccagacaaatatcccaacgctgattgcaggcaaccctcagccagtccatggtgctgggcctggctcaggatccaatgtgtcaatgaaccagcagaatcctcaggcccctcaggcccagtctttgggtggaatgcatgtcaatggcgcacctcctctgatgcaagcttctatgcagggtggagttccagcaccagggcaaatgccagctgctgtcacaggacctggccctggttccttagctcctggaggaggaatgcaggctcaggttggaatgccaggaagtggaccagtgtccatggaacgggggcaagtgccgatgcaagaccccagagcagctatgcagcggggatccttgcctgcgaatgtcccaacccctcgaggcttgttaggagatgctccgaatgatccacggggaggcactttactttctgtaactggagaggtagagcctagaggttacttgggaccacctcatcagggtccacccatgcaccatgtccctggccatgagagccgaggaccacccccacatgaactgaggggagggccattacccgagcccagacctctaatggcagaaccaagaggacccatgctagatcagaggggtccacccttggatggcagaggtggaagggatccccgaggaatagatgcacgagggatggaggcccgagccatggaggcaagagggttagatgccagaggattagaggcccgtgcaatggaggcccgtgcgatggaagctcgtgcaatggaggcccgagcgatggaggcccgtgcaatggaagtccgagggatggaggccagaggcatggataccagaggcccagtgcctggccccagaggacctatacctagtggaatgcagggtcccagtccaattaacatgggggcggttgtcccccagggatccagacaggtcccagtcatgcagggaacaggaatgcaaggagcaagtatacagggtggaagccagcctggcggctttagtcccgggcagaaccaagtcactccacaggatcatgagaaggctgctttgattatgcaggttctacaactgactgcagaccagattgccatgttgcctcctgagcaaaggcagagtatcctgattttaaaggaacaaatacagaaatccactggagcaccttgataggttttcaaaaatacctggcaagaaatctggaaattctataattttgttgaaatattgaaaaaagatgacctgcatcctaacccttgaatgactcaaatcagtgccaggtggaggactcccatcaccttctctcagaacaaaatcacttcattttattgtcttagtttgtatattttctgtgacttgaaataaactttgaacacaattttagtacactgc

SEQ ID NO: 6240 - protein, 577 aa, Homo sapiens
MAGLTVRDPAVDRSLRSVFVGNIPYEATEEQLKDIFSEVGPVVSFRLVYDRETGKPKGYGFCEYQDQETALSAMRNLNGREFSGRALRVDNAASEKNKEELKSLGTGAPVIESPYGETISPEDAPESISKAVASLPPEQMFELMKQMKLCVQNSPQEARNMLLQNPQLAYALLQAQVVMRIVDPEIALKILHRQTNIPTLIAGNPQPVHGAGPGSGSNVSMNQQNPQAPQAQSLGGMHVNGAPPLMQASMQGGVPAPGQMPAAVTGPGPGSLAPGGGMQAQVGMPGSGPVSMERGQVPMQDPRAAMQRGSLPANVPTPRGLLGDAPNDPRGGTLLSVTGEVEPRGYLGPPHQGPPMHHVPGHESRGPPPHELRGGPLPEPRPLMAEPRGPMLDQRGPPLDGRGGRDPRGIDARGMEARAMEARGLDARGLEARAMEARAMEARAMEARAMEARAMEVRGMEARGMDTRGPVPGPRGPIPSGMQGPSPINMGAVVPQGSRQVPVMQGTGMQGASIQGGSQPGGFSPGQNQVTPQDHEKAALIMQVLQLTADQIAMLPPEQRQSILILKEQIQKSTGAP

SEQ ID NO: 6241 - DNA, 2706 bp, Homo sapiens
aagggttggctgcgcgtgcggcgggagtagaggcgccttgcgcaccaggaagtgactgtttccccgccgcagcaaaccaggccatccgctggccttttagtttgccgcctcaggtttgtaagaggatttattggttacgaaggaaggtggatttcagtgtgttctttggatggcaggccttaagagaagagtcccactgcacagcctcagatacttcatctccatggtgggtctcttctccaaaccaggactgcttccctggtatgccagaaatccaccaggatggtcacagctctttctgggcacagtatgtaagggagatttcacccgtgtgatagccacgaaatgtcagaaaggacaaaaaagtcagaagaaaccaagccatcttggaccactagatggttcctggcaggaaaggctggctgatgttgtgacaccactctggaggttgagctatgaagaacagctcaaggtgaaatttgcagctcagaagaaaattttacaaagactagagtcttacatccaaatgctcaatggagtcagtgtgacaacggctgtacccaaatctgagaggctctcttgtcttctccatcctattataccctctcctgtcatcaatggttaccgaaataagtccaccttctctgtgaaccgaggtccagatggcaatccaaagactgtggggttctacctgggaacttggagagatgggaacgttgtctgtgtgcagtctaatcatctgaaaaacatccctgagaaacacagtcaagtggcgcagtactatgaagtattccttcgacagtctccattggagccctgccttgtatttcatgaaggtggatactggcgtgagctcacagtccgcaccaatagccaagggcacacaatggctatcatcactttccatccccagaaattaagtcaggaggagctccatgttcagaaggagattgtaaaggaatttttcatcagaggtcctggagcagcctgtggcttgacctcactttacttccaggaaagtaccatgacccgttgcagccatcagcagtctccctatcagcttctgtttggggaaccctacatctttgaagaacttctgagcttgaagatccgcatctctccagatgcctttttccagattaacacagctggtgcagagatgctgtatcggactgtgggggagctgactggagtgaactctgacaccatccttcttgacatctgctgtggaactggtgtgattggcctctctctggctcagcatacatctcgggtccttgggattgaattgttggagcaggcagtggaggatgcaagatggactgcagccttcaatggcatcaccaactctgaatttcatactggtcaagcagagaagattttgccagggctgctaaagtcaaaggaagatggacagtcaattgttgctgtggtgaacccagcccgtgccggactgcattacaaggtgattcaagccattcgaaacttcagggccatccacacgctagtttttgtttcctgcaagctccatggtgaatccactaggaatgtcattgagctgtgctgtcctccagaccctgctaagaagctcttaggcgagccctttgtcctgcagcaagctgtacctgtggatttgttccctcacaccccacattgtgagctggtgctcctctttactcgataagcagcctcctagaagacagcaggctatttgttaaggctgaagtttcagaaactttcaggtttggcatattgctacattgcagaccctgggagcattacagtggaaaccaatctttggtttgtgaataggaagaatctattaggcctctggtctgaggcagattttttttttgagatagagtctcactcttgcccaggctggagtgtcgtggcgtgatctcagctcactgcaacctccgcctcccgggttcaagtgattctcgtgcctcagcttccccagtagctaggattaaaggtgcgtgccaccatgcccggctaatttttgtatttttggtagagacagggtttcaccatgttggccaggctggtctcaaactcctgacctcaagtgatccacccgcctcggcctctcaaagtgctgggattataggcgtgagccaccacaccccgccgcggctgacttaaccttagatttcagattccctttcaatcatgcccgtttgcttgggtttgaccactccccactcctggatctggactgtttcttcctgttgctgtcagccttggttctagtttatagtcttgtctcctccgtttctgcttatggtgtggacaaatgaccttttttaagcagctggtaataattttacattgactggagcctgtgcatttgctcagagatgctacaatttttagatatttctaagacttctggattcttgaggtagttaaggattaaaaccagaaacagtcgaggttttttaaaagcagggtaagccatgaagtgaatacagggtgactgagtgatcatcagatgagattaattcttttgggttttcttggttttaaggcatctcgaatgccccttgaaaatgtagttttccctggtggtgggcacctgtaatcccagctactcgggaggctgaggcaggataattgcttgaacctgggaggtggaggttgcagtgagctgaaattgtgccactgcactccagcctgggtgacagagtgagacaccatctc

SEQ ID NO: 6242 - DNA, 1168 bp, Homo sapiens
gcggagttcgtctctgcaagcttggtcgccctgggatggattcctcctcctcttcctccgcggcgggtttgggtgcagtggacccacagttgcagcatttcatcgaggtagagactcaaaagcagcgcttccagcagctggtgcaccagatgactgaactttgttgggagaagtgcatggacaagcctgggccaaagttggacagtcgggctgaggcctgttttgtgaactgcgttgagcgcttcattgatacaagccagttcatcttgaatcgactggaacagacccagaaatccaagccagttttctcagaaagcctttctgactgatctcagcattacctctttggaaaaggaaggtagttcaagaaatgaagagctgttgatgggatgattgaagaaacagctatgagaggattggctcccatcttttgttactcttgggacatcctgtcatctgagaatgaacaaagaccaattttttgtgtgtgaagcttaagggtcatatgtttgcttgtattttttaatgctaatcttgtgaaaataattgacaggcgaaagaaaactctatttagatgcatattactgtacatgggactatgcttttctcaaagccccattaactgcttcctataattttgatagtgggaccacatacgtaaaaatctctcatttgtgtggagtcatttctgatttcaggggagatccttgtgtttatcagaaagggcagaagtaggggaagaataatttggtatccttatctagtgtttgattgtcaatgctggagaaaaatatctgtaagagtgtttatacagtacacttcagttatcttgatctccctttcctatatgatgatttgcttaaatatccatattaagtaagtctcaaggtagggtaggcagcctgagagtctagaggcctttagttataaaggaatctagccagtgaacataattcttattactagactgccacaaggaagaaattaacttaccctgtatatcagggtacaaaaaattcagtgatgtgcctaaataagttataaagatttaggccaatcagaagctaacagcagtttcaggtagaggtgcatgcctaatgttagttagtgtagattccatttactgcattcttctgatcactgaaataaaagctatataagattcata

SEQ ID NO: 6243 - protein, 97 aa, Homo sapiens
MDSSSSSSAAGLGAVDPQLQHFIEVETQKQRFQQLVHQMTELCWEKCMDKPGPKLDSRAEACFVNCVERFIDTSQFILNRLEQTQKSKPVFSESLSD

SEQ ID NO: 6244 - DNA, 425 bp, Rattus norvegicus
gcggtttctttctttccgcgccgatagcgctcacgcaagcatggttaacgtccctaaaacccgccggactttctgtaagaagtgtggcaagcaccaaccccataaagtgacacagtacaagaagggcaaggattctctgtacgcccagggaaagcggcgttatgacaggaagcagagtggctatggtgggcaaactaagccgattttccggaaaaaggctaaaactacaaagaagattgtgctaaggcttgagtgcgttgagcccaactgcagatctaagagaatgctggctattaaaagatgcaagcattttgaactgggaggagataagaagagaaagggccaagtgatccagttctaagtgtcatcttttattatgaagacaataaaatcttgagtttatgttcaaaaaaaaaaaaaaaaaa

SEQ ID NO: 6245 - protein, 106 aa, Rattus norvegicus [sequence omitted]

SEQ ID NO: 6246 - DNA, 1826 bp, Homo sapiens
cacgtcggctgctgggaagatctggattctcgtttcaggtcaccatcagaaaagctaagtttgctgtatagtgaggatcaggagatctgatcctgattgcagaaccttccctgattacagaatcttggatgatttcacaaaagttcatcttcattgcagatacctgcctttctttctaggttgtatctcccacttcacccttctagaccatcccagaagatctataagatttcatctgggaaatcactaggagttcttggaagggaaagaaggaagattgttggttggaataaaaacagggttgaatgagttccagaaagcagggttctcaacctcgtggacagcaatctgcagaagaagagaacttcaaaaaaccaactagaagcaacatgcagagaagtaaaatgagaggggcctcctcaggaaagaagacagctggtccacagcagaaaaatcttgaaccagctctcccaggaagatggggtggtcgctctgcagagaaccccccttcaggatccgtgaggaagaccagaaagaacaagcagaagactcctggaaacggagatggtggcagtaccagcgaagcacctcagccccctcggaagaaaagggcccgggcagaccccactgttgaaagtgaggaggcgtttaagaatagaatggaggttaaagtgaagattcctgaagaattaaaaccatggcttgttgaggactgggacttagttaccaggcagaagcagctgtttcaactccctgccaagaaaaatgtagatgcaattctggaggagtatgcaaattgcaagaaatcgcagggaaatgttgataataaggaatatgcggttaatgaagttgtggcaggaataaaagaatatttcaatgtgatgttgggcactcagctgctctacaaatttgagaggccccagtatgctgaaatcctcttggctcaccctgatgctccaatgtcccaggtttatggagcaccacacctactgagattatttgtaagaattggagcaatgttggcctatacgccccttgatgagaaaagccttgcattattgttgggctatttgcatgatttcctaaaatatctggcaaagaattctgcatctctctttactgccagtgattacaaagtggcttctgctgagtaccaccgcaaagccctgtgagcgtctacagacagctcaccatttttgtcctgtatctgtaaacactttttgttcttagtctttttcttgtaaaattgatgttctttaaaatcgttaatgtataacagggcttatgtttcagtttgttttccgttctgttttaaacagaaaataaaaggagtgtaagctccttttctcatttcaaagttgctaccagtgtatgcagtaattagaacaaagaagaaacattcagtagaacattttattgcctagttgacaacattgcttgaatgctggtggttcctatccctttgacactacacaattttctaatatgtgttaatgctatgtgacaaaacgccctgattcctagtgccaaaggttcaacttaatgtatatacctgaaaacccatgcatttgtgctctttttttttttatggtgcttgaagtaaaacagcccatcctctgcaagtccatctatgttgttcttaggcattctatctttgctcaaattgttgaaggatggtgatttgtttcatggtttttgtatttgagtctaatgcacgttctaacatgatagaggcaatgcattattgtgtagccacggttttctggaaaagttgatattttaggaattgtatttcagatcttaaataaaatttgtttctaaatttc

SEQ ID NO: 6247 - protein, 288 aa, Homo sapiens
MSSRKQGSQPRGQQSAEEENFKKPTRSNMQRSKMRGASSGKKTAGPQQKNLEPALPGRWGGRSAENPPSGSVRKTRKNKQKTPGNGDGGSTSEAPQPPRKKRARADPTVESEEAFKNRMEVKVKIPEELKPWLVEDWDLVTRQKQLFQLPAKKNVDAILEEYANCKKSQGNVDNKEYAVNEVVAGIKEYFNVMLGTQLLYKFERPQYAEILLAHPDAPMSQVYGAPHLLRLFVRIGAMLAYTPLDEKSLALLLGYLHDFLKYLAKNSASLFTASDYKVASAEYHRKAL

SEQ ID NO: 6248 - DNA, 1516 bp, Homo sapiens
ttggtctaagacatgggctgacaaactttttccataaagggccagaaagtaaatatttcaggctttgtgggatatctatttatgatttattttactcctagtattatttcatcttttatacaggttattaaggttagtattgctgcataacaaattactccaaaatttaatcatttatattcaagaagagttcagctgctaggttcttattttgggactctcatgatgctgaggtcaagatgccagctggaggccaggcgccgcagctcacgcctgtaatcccagcgttttgggaggccaggggcctcccaaattcaaaaggaagagacaaagtccacatctgtcaatgcgaagaatggaaaggtcacatatcatatgtggagcgggacataacaacttcggaaattaaatctcttccccaggtcagtgtgcgggccttccacgctgccagcggaacactggaatggcggaaggggaacgggtacggcagggggaaaggctgggggtggggtcgggtcgagtcgagggaagctggcccgagtgtggacagagatggcggtctgcgcgtctgttgttcccagcgctctgcgaagcctgaaaaggaggagcaacctgtccagaatccccgcaggtccgtgaaagacaggaaaaggaggggaaatctcgacatggaaaaactctacagtgaaaatgaaggaatggcttcaaaccaaggaaagatggaaaatgaagaacagccacaagacgagagaaagccagaagtaacttgtactctggaagacaagaagttagaaaacgagggaaagacagaaaacaagggcaaaacaggagatgaggaaatgttaaaggataaaggaaagccagagagtgagggagaggcaaaagaaggaaagtcagagagggagggagagtcagagatggagggaggatcagagagagagggaaaaccagagatagagggaaagccagagagtgaaggagagccagggagtgaaacaagggctgcaggaaagcgcccagctgaggatgatgtacccaggaaagccaaaagaaaaactaataaggggctggctcattacctcaaggagtataaagaggccatacatgatatgaatttcagcaatgaggacatgataagagaatttgacaatatggctaaggtgcaggatgagaagagaaaaagcaaacagaaattgggggcgtttttgtggatgcaaagaaatttacaggaccccttctaccctagaggtccaagggaattcaggggtggctgcagggccccacgaagggacattgaagacattccttatgtgtagtgtccctggcaggcatttaccaggccatgtgctttaacgttacggtaatactttactttaggcatccctcctgttgctagcagccttttgacctatctgcaatgcagtgttctcagtaggaaatgttcatctgttacatggaaaaaatgttgatggtgcattgtaaaattaaaaaacacaacttgcagaaccaaaaaaaa

SEQ ID NO: 6249 - protein, 358 aa, Homo sapiens
MPAGGQAPQLTPVIPAFWEARGLPNSKGRDKVHICQCEEWKGHISYVERDITTSEIKSLPQVSVRAFHAASGTLEWRKGNGYGRGKGWGWGRVESREAGPSVDRDGGLRVCCSQRSAKPEKEEQPVQNPRRSVKDRKRRGNLDMEKLYSENEGMASNQGKMENEEQPQDERKPEVTCTLEDKKLENEGKTENKGKTGDEEMLKDKGKPESEGEAKEGKSEREGESEMEGGSEREGKPEIEGKPESEGEPGSETRAAGKRPAEDDVPRKAKRKTNKGLAHYLKEYKEAIHDMNFSNEDMIREFDNMAKVQDEKRKSKQKLGAFLWMQRNLQDPFYPRGPREFRGGCRAPRRDIEDIPYV

SEQ ID NO: 6250 - DNA, 1030 bp, Homo sapiens
gaagtcctggtaatctggtccttgttcccgtctggataccagcttccttcagcagcgcaggcggtggtccctgaggcccgtggaaggagtcaaacttgcgggaattttgcagtttatctgcagggctgttgtttccagcaagacccaaagctagaaaaggaggaggaagaaactgacccgatcagtgccagaagtcattgtattcaaagaagaataagcaagaaagaaaagaaggaaggaagagaggtagacagatacaagatgaaatcctgtcaaaaaatggaaggaaaaccagaaaatgagagtgaaccaaagcatgaggaagagccaaagcctgaggaaaagccagaagaggaggagaagctagaggaggaggccaaagcaaaaggaacttttagagaaaggctgattcaatctctccaggagtttaaagaagatatacacaacaggcatttaagcaatgaagatatgtttagagaagtggatgaaatagatgagataaggagagtcagaaacaaacttatagtgatgcgttggaaggttaatcgaaaccatccttacccctatttaatgtagtttaccttgatttttatctgatattaacaataccatatagcttgctttttattagcatttcctgatattcctttgtccatatttctacttataacctgttgctattaatggttttagatgtatctcttgttatctgcatctcattgtttattgtattttgaaccaatctacaagtctctgtcttttaataaaagaactttacacatttgtaaaaaagaggttcttggtaagatataaaatggaaaaaggctaagtaatatgtgaatatcatatttttgaaaggtaaaaagtacatttgtatattacatatatggacataacttgtgaaggatgaaagaaagtacagcctctcggtggtgggattatgaatgatttttctccttttgcttgtttgtattttctatattcctaaaattaacacacattattattgctagaataataaaagttttat

SEQ ID NO: 6251 - DNA, 1243 bp, Homo sapiens
caggatgacagctggagaatggagtcagttttatccaagtatgaagatcagattactattttcactgactacctagaagaatatccagatacagatgagctggtatggatcttagggaagcagcatctccttaaaacagaaaaatctaagctgttgtctgatataagtgctcgtctatggtttacatacagaaggaaattttcaccaattggtggaacgggcccttcatcagatgctggttggggatgtatgctacgctgtggacagatgatgctggctcaagcccttatctgtagacacttgggaagggactggagctgggagaaacaaaaagaacaacccaaagaataccaacgcatcctacagtgcttcttagatagaaaagattgttgctactctatccatcaaatggcacaaatgggtgtaggagaagggaaatcaattggagaatggtttggaccaaatacagttgcacaggtgttaaaaaaacttgctttatttgacgaatggaattccttggctgtttatgtttcaatggataacacagtggtcattgaagatatcaaaaaaatgtgccgtgtccttcccttgagtgctgacacagctggtgacaggcctcccgattctttaactgcttcaaaccagagtaagggcacctctgcctactgcacagcctggaaacccctgctgctcattgtgccccttcgcctgggcataaaccaaatcaatcctgtctatgttgatgcattcaaagagtgttttaagatgccacagtctttaggggcattaggaggaaaaccaaataacgcgtattatttcataggattcttaggtgacgagctcatcttcttggaccctcatacaacccagacctttgttgacactgaagagaatggaacggttaatgaccagactttccattgcctgcagtccccacagcgaatgaacatcctaaacctggatccttcagttgcattgggatttttctgcaaagaagaaaaagactttgataactggtgtagccttgttcagaaggaaattctaaaggagaatttaaggatgtttgaattagttcagaaacatccatcacactggcctccctttgtacctccagccaagccagaagtgacaaccactggggcagaattcattgactctactgagcaactggaggagtttgatctggaggaagattttgagattctgagtgtgtagaatcctgggaactcaacttgaaggtctg

SEQ ID NO: 6252 - protein, 398 aa, Homo sapiens [sequence omitted]

SEQ ID NO: 6253 - DNA, 789 bp, Homo sapiens
ctttccctctcccaacatggcggcctcagcaaaaaagaagaataagaaggggaagactatctccctaacagactttctggctgaggatgggggtactggtggaggaagcacctatgtttccaaaccagtcagctgggctgatgaaacgatgacctggaaggagatgtttcgacaacttggcacagtaacaatgacgatgtgtatagggtgcctccaattgaccgttccatccttcccactgctccacgggctgctcgggaacccaatatcgaccggagccgtcttcccaaatcgccaccctacactgcttttctaggaaacctaccctatgatgttacagaagagtcaattaaggaattctttcgaggattaaatatcagtgcagtgcgtttaccacgtgaacccagcaatccagagaggttgaaaggttttggttatgctgaatttgaggacctggattccctgctcagtgccctgagtctcaatgaagagtctctaggtaacaggagaattcgagtggatgttgctgatcaagcacaggataaagacagggatgatcgttcttttggccgtgatagaaatcgggattctgacaaaacagatacggactggagggcttgtcctgctacagacagctttgatgactagaagaggtgatgatagctttggagacaagtatgattcccggataggcagtggcagaagagcatttggcagcgggtatcgcagggatgatgactacagaggaggcggggaccgctatgaagactgatatgacagacgggatga

SEQ ID NO: 6254 - protein, 224 aa, Homo sapiens
MAASAKKKNKKGKTISLTDFLAEDGGTGGGSTYVSKPVSWADETDDLEGDVSTTWHSNDDDVYRAPPIDRSILPTAPRAAREPNIDRSRLPKSPPYTAFLGNLPYDVTEESIKEFFRGLNISAVRLPREPSNPERLKGFGYAEFEDLDSLLSALSLNEESLSNRRIRVDVADQALDKDRDDPPFGRDRNRDSDKTDTDWRARPATDTFDDYPPRRGDDSFGDKL

SEQ ID NO: 6255 - DNA, 970 bp, Homo sapiens
ctttccctctcccaacatggcggcctcagcaaaaaagaagaataagaaggggaagactatctccctaacagactttctggctgaggatgggggtactggtggaggaagcacctatgtttccaaaccagtcagctgggctgatgaaacgatgacctggaaggagatgtttcgacaacttggcacagtaacaatgacgatgtgtatagggtgcctccaattgaccgttccatccttcccactgctccacgggctgctcgggaacccaatatcgaccggagccgtcttcccaaatcgccaccctacactgcttttctaggaaacctaccctatgatgttacagaagagtcaattaaggaattctttcgaggattaaatatcagtgcagtgcgtttaccacgtgaacccagcaatccagagaggttgaaaggttttggttatgctgaatttgaggacctggattccctgctcagtgccctgagtctcaatgaagagtctctaggtaacaggagaattcgagtggatgttgctgatcaagcacaggataaagagtatcgggatcgttatgattcagaccggtatcgggatgggtatcgggatggcccacgccgggatatggatggatatggtggccgggatcgctatgatgaccaaggcagcagagactatgatagaggctatgattcccggataggcagtggcagaagagcatttggcagcgggtatcgcagggatgatgactacagaggaggcggggaccgctatgaagactgatatgacagacgggatgatcggtcgtggagctccagagatgattactctcgggatgattataggtgtgatgatagacgtcccccccaaagacccaaactgaatctaaagccttggagtactcttaagcaagatgattcctctgctagtacctcccagtccactcgagctgcttctatctttggaggggcaaagcctgttg

SEQ ID NO: 6256 - DNA, 1813 bp, Homo sapiens
atggcggcctcagcaaaaaagaagaataagaaggggaagactatctccctaacagactttctggctgaggatgggggtactggtggaggaagcacctatgtttccaaaccagtcagctgggctgatgaaacgatgacctggaaggagatgtttcgacaacttggcacagtaacaatgacgatgtgtatagggtgcctccaattgaccgttccatccttcccactgctccacgggctgctcgggaacccaatatcgaccggagccgtcttcccaaatcgccaccctacactgcttttctaggaaacctaccctatgatgttacagaagagtcaattaaggaattctttcgaggattaaatatcagtgcagtgcgtttaccacgtgaacccagcaatccagagaggttgaaaggttttggttatgctgaatttgaggacctggattccctgctcagtgccctgagtctcaatgaagagtctctaggtaacaggagaattcgagtggatgttgctgatcaagcacaggataaagacagggatgatcgttcttttggccgtgatagaaatcgggattctgacaaaacagatacggactggagggcttgtcctgctacagacagctttgatgactagaagaggtgatgatagctttggagacaagtatcgggatcgttatgattcagaccggtatcgggatgggtatcgggatggcccacgccgggatatggatggatatggtggccgggatcgctatgatgaccaaggcagcagagactatgatagaggctatgattcccggataggcagtggcagaagagcatttggcagcgggtatcgcagggatgatgactacagaggaggcggggaccgctatgaagactgatatgacagacgggatgatcggtcgtggagctccagagatgattactctcgggatgattataggtgtgatgatagacgtcccccccaaagacccaaactgaatctaaagccttggagtactcttaagcaagatgattcctctgctagtacctcccagtccactcgagctgcttctatctttggaggggcaaagcctgttgacacagctgctagagaaagagaagtagaagaacggctacagaaggaacaagagaagttgcagcgtcagctgagtgagccaaaactagaacgacggcctcgggagagacacccaagctggcgaagtgaagaaactcaggaacgggaacggtcaaggacaggaagtgagtcatcgcagactgggacctccaccacatctggcagaaatgcacgaaggagagagagtaagaagtctctagaaaatgaaacactcaataaggaggaagattgccactctccaacttctaaacctcccaaacctgatcagcccctaaaggtaatgccagcccctccaccaaaggagaatgcttgggtgaagcgaagttctaaccctcctgctcgatctcagagctcagacgcagagcagcaatcccctacaagtggtgggggaaaagtagctccagctcaaccatctgaggaaggaccagcaaggcaagatgaaaataaagtagatgggatgaatgtcccaaaaggccaaactgggaactctagccgtggtccaggagacggagggaacaaagaccactggaaggagtcagataggaaagatggcaaaaaggatcaagactccagatctgcacctgagccaaagaaacctgaggaaaatccagcttccaagttcagttctgcaagcaactatgctgctctctcttgatggtgaagatgaaaatgagggagaagattatgccgaatag

SEQ ID NO: 6257 - DNA, 2587 bp, Homo sapiens
aaagttgctagctgggggcagagacggccacgcggttgcaggagtaagagatccctctgtggcgaattggccaacggctcctttcaaccctgcctcgttggtggccactggagaagcgcggggggctcccccagacagccgtggggacaagttagagccagcactttaccccgggccttgcgtgtagcttcccctcccctactctcggtgccctggtgtctggaggggggttgtgggggtgtgcccgccttacatggtccaccacccgggcaaccctctgggcttgtgttccatctcactcttgcttcctgtactgtggtcaaggggaaccactgcatcatgtcccggtatagctaccagagtctcctggactggctctatgggggcgtggaccccagttttgcaggcaatgggggccccgactgtgctgccttcctctcttggcagcagcggctgctggaaagtgtggtggtcctgaccctggctctgttggagatcctggtggccctgcggcacatcctgaggcagacgaaggaggacggtaggggtagccctggcagccagccagagcaggtgacccagcggccagaggaaggcaaggagagcctgagcaagaatctgctcttagtagccctgtgcctgaccttcggggtggaggtgggctttaagttcgccaccaagaccgtcatctacctgctcaacccctgtcacctggtcaccatgatgcatctcccctttgaattggagatttactacattcagcatgttatgctctacgtggtacccatctacctgctttggaaaggaggtgcttacactccagagcccctcagcagtttccggtgggctcttctctcaactggcctcatgttcttttatcacttcagcgtcttgcagatcctcggcctggtcaccgaagtgaatttgaacaacatgctgtgtccggccatctcagacccattctacggcccctggtatcgcatctgggcctcgggacaccagactctcatgaccatgacccacgggaagctggtcatcctgttctcatacatggctgggcccttgtgtaaatatctgctggatttgctccggcttccagccaagaaaatagactgaaggtgcttatttttttttttttcctccctgaggaagcaagtcgtgacttgacttggagaacacccagttcttgataaaatcatgggagagggcagtaggatgtttggtgtatttctttttcctcctttctgtccctttcttctaccactcttcctttcccagctcttccccctacgatgtctccttgagcctggggtgtagtgctgggcgctggattttcctccttccctttggctctctcctcaaacttcatcgcattcatagaagctgcttgcagggtcgccgggctaaccagggtgatcggcgaactttaccgtacagtacctcagtctagctgtcagatcaccccttttgctgtagcctctgttgaggtttttatatttgtgatcattggtaattcagtgtcctatgaagtgggcacagctccccacagagagcaagttgtcagcaggtctctgtgcactggtattggggcagggcagtgccctgggggtaagctaggtggctcagggagtggcagaagggccatttttccctctgccaaaaagacttccttggatttgtagatgttgacccagagtcctctgtcccctcctgaagaggattttcttactggtttctactgaaggggaggtaggggaggaggaaaaaaggaccatgtgtgatgctgttagacaagacactgacgctgattatggagggtctcctgcaggcccttgtgggctccttggcaaggccccaggctgggaaggagctccccccactgcccatcctgcccgctttgtggcgggtagagtcagtgacagggaggcagccctccttttgtgtatatagagtgagctgatttgggctcaggaaaacctagtcgcttgttgctctcgtctgtgacatttttgtacactggtttgctactcatggcaagaaacagacaaagccccatgaaaaataaaacaaaacaaaagtcatttcaaacaaagctgttgttttgaaaactcttgctttcttttggtgtccattttgtgttctattttaaagaatctttcatttatattggtgttattgtagtgaagagaatgtgataggctgatctgtaatggtttctgtcaggagcttagcaaatgcctctgcccctcttcccctacccctgtccttcctcagttcccagctgggattgctatgcactgggcagacccgtcactgtctcccctgaacccccacacagtggcttcccttagaaccagtctttgtactctccctaaacagcagcaggcttaggatttttgtcaggctggttcttgcgtgctctgtgcccccaccagtttgctcacctcttggggcattttgtaatgtgttttctctgtcttgtaaaaccttttgattgtaccgaaatggtatctgcagtcgcctttggaaataaatggtcattaatttgtgtacttagcattctgaaaaaaaaaaaaaaaaaaaaaaa

SEQ ID NO: 6258 - protein, 258 aa, Homo sapiens
MSRYSYQSLLDWLYGGVDPSFAGNGGPDCAAFLSWQQRLLESVVVLTLALLEILVALRHILRQTKEDGRGSPGSQPEQVTQRPEEGKESLSKNLLLVALCLTFGVEVGFKFATKTVIYLLNPCHLVTMMHLPFELEIYYIQHVMLYVVPIYLLWKGGAYTPEPLSSFRWALLSTGLMFFYHFSVLQILGLVTEVNLNNMLCPAISDPFYGPWYRIWASGHQTLMTMTHGKLVILFSYMAGPLCKYLLDLLRLPAKKID

SEQ ID NO: 6259 - DNA, 1290 bp, Homo sapiens
atgctgtatgaattccaaactgttgcttcacacccaatgtcaggatactcaaccatgattggaatcaataaactacaggacttcttgcccacgtgcgccttcaaaacggtaagagctgcaactgaacgtgtgagacatggtgcagataggctgagaggcggcgggagagatgcccatgaactcaagtacccggacacgccctccacttctaccaccacgagtaacaccgcccccacgggaccgctctcgaggtcccccaagccaagatcatggccgccaccaggctcccgagccgtggcttcctgtccgggaacggcccggcgtcctggctgtccagctagtcctggcgcctctctctggggcttccaccgcccgaccccgcggcggagcctgcttctctcggacctccagagacctcggatccgtccgagcacctgccctagtcctgcctggtcccccaggacagtcccaagccactcctccccaggcgagcacagcgaaggcaccggcaaggggctgggggaagagcccacgccagcctacgtcacgcaggaagggagccagtggccaccccaaacacacctctcctcctcacacctggcctacgtccaactctccacggctctacccagaaggctgcacgacttcttgcccacgtgcgccttcaaaacggtaagagctgcaactgaacgtgtgagacatggtgcagataggctgagaggcggcgggagagatgcccatgaactcaagtacccggacacgccctccacttctaccaccacgagtaacaccgcccccacgggaccgctctcgaggtcccccaagccaaggcagagtccgacgggtccttccttctgggtgcccccggcttcccggactccagcaggcctgggaaggccccgggcccccttagccgatgcccagagagtctccatttctcaagctttgccaccgaactcatcggtcggacgcaaggaggaacgccccggcgccggccagcagcggcgggcaccggcgccaatggccacggaactcagcactggcagtcggccctcctcacaccgcaggcgtgcagtgtggccgacggagcctcccgggccgaggacccagctagagccgtcaccccggttgctcccacgggaaggggcaccaggcaaactgcccaaggccccgagcccaggctccctggcggaggcctccgctggtcccgcccagatcatggccgccaccaggctcccgagccgtggcttcctgtccgggaacggcccggcgtcctggctgtccagctag

SEQ ID NO: 6260 - protein, 241 aa, Homo sapiens [sequence omitted]

SEQ ID NO: 6261 - DNA, 1242 bp, Homo sapiens
atgccccgcggccaactttcttccttggacccacaaggaggaacgacccgggtgccggcaagaagccgccgggaagcccgcgccattggcacacggaatctcggcaattgccaattcggcctacttacaaaccgcaaggcttgccattttggcccaacggaaccttcccggcccaagaacccagcttggcccttaacccccgtttgcttccacgggaaggggcaaccaagcaaaatgcccaaggcccccgagcccaggggtccctgccgaaggcctccgctggtcccgcccagatcatgggcgccaccaggctcccgagccgtggcttcctgtccgggaacggcccggcgtcctggctgtccagctagtcctggcgcctctctctggggcttccaccgcccgaccccgcggcggagcctgcttctctcggacctccagagacctcggatgcgtccgagcacctgccctagtcctgcctggtcccccaggacagtcccaagccactcctccccaggcgagcacagcgaaggcaccggcaaggggctgggggaagagcccacgccagcctacgtcacgcaggaagggagccagtggccaccccaaacacacctctcctcctcacacctggcctacgtccaactctccacggctctgcccagaaggctgcacgacttcttgcccacgtgcgccttcaaaacggtaagagctgcaactgaacgtgtgagacatggtgcagataggctgagaggcggcgggagagatgcccatgaactcaagtacccggacacgccctccacttctaccaccacgagtaacaccgcccccacgggaccgctctcgaggtcccccaagccaagggcaagggcctgcgcacccccaaagacaagcggggtccccggaaggcccccaggcagaaatgagcaccacggggaacggcccgcctccaagacaacctcggggacatggacacaacaagacagggtggcaagtctcaacaaggcgggtgcgcggcgtctgaaggcgtgcagtgtggccgacggagcctcccgggccgaggacccagctaggccgtcaccccggttgctcccacgggaaggggcaccaggcaaactgcccaaggccccgagcccaggctccctggcggaggcctccgctggtcccgcccagatcatggccgccaccaggctcccgagccgtggcttcctgtccgggaacggcccggcgtcctggctgtccagctag

SEQ ID NO: 6262 - protein, 413 aa, Homo sapiens
MPRGQLSSLDPQGGTTRVPARSRREARAIGTRNLGNCQFGLLTNRKACHFGPTEPSRPKNPAWPLTPVCFHGKGQPSKMPKAPEPRGPCRRPPLVPPRSWAPPGSRAVASCPGTARRPGCPASPGASLWGFHRPTPRRSLLLSDLQRPRMRPSTCPSPAWSPRTVPSHSSPGEHSEGTGKGLGEEPTPAYVTQEGSQWPPQTHLSSSHLAYVQLSTALPRRLHDFLPTCAFKTVRAATERVRHGADRLRGGGRDAHELKYPDTPSTSTTTSNTAPTGPLSRSPKPRARACAPPKTSGVPGRPPGRNEHHGERPASKTTSGTWTQQDRVASLNKAGARRLKACSVADGASRAEDPARPSPRLLPREGAPGKLPKAPSPGSLAEASAGPAQIMAATRLPSRGFLSGNGPASWLSS

SEQ ID NO: 6263 - DNA, 882 bp, Homo sapiens
ccctcacctcccaggaatggggagggggcatcctaccccatatctgaggtgcgactgcgggacgtagagcggactgggcctttcccgttggcgcgtggcctcaatcaggacttcttgcccacgtgcgccttcaaaacggtaagagctgcaactgaacgtgtgagacatggtgcagataggctgagaggcggcgggagagatgcccatgaactcaagtacccggacacgccctccacttctaccaccacgagtaacaccgcccccacgggaccgctctcgaggtcccccaagccaaggacgcaaggaggaacgccccggcgcgcggccagcagcggcgggcaccggcccaatggccacggaactcagcactggcagtcggccctcctcacaccgcaggcgtgcagtgtggccgacggagcctcccgggccgaggacccagctaggccgtcaccccggttgctcccacgggaaggggcaccaggcaaactgcccaaggccccgagcccaggctccctggcggaggcctccgctggacttcttgcccacgtgcgccttcaaaacgggcaagggcctgcgcacccccaaagacaagcggggtccccggaaggcccccaggcagaaatgagcaccacggggaacggcccgcctccaagacaacctcggggacatggacacaacaagacagggtggcaagtctcaacaaggcgggctggcgtgggctcttcccccagccccttgccggtgctgccacgtgagaagggcccgggtgccggtcccgctattccggaattgtgggttcacctgaagtttgaggccaaacccccagcggtcagtgggacgccagtcgcctttgacctcttggtcaagctggccttgccgtga

SEQ ID NO: 6264 - protein, 141 aa, Homo sapiens
MPMNSSTRTRPPLLPPRVTPPPRDRSRGPPSQGRKEERPGARPAAAGTGPMATELSTGSRPSSHRRRAVWPTEPPGPRTQLGRHPGCSHGKGHQANCPRPRAQAPWRRPPLDFLPTCAFKTGKGLRTPKDKRGPRKAPRQK

SEQ ID NO: 6265 - DNA, 1039 bp, Homo sapiens
agggagcgcacgacgtgcgcgcaccctctgccctggtccatcgctgccgcctccttcttctgcagctcctggtgctgcttgtgtgctcgtttggtgcggacctggtacctcttttgtgaaacggcagctgaggagattccggcgcttgccatggccgacgaaaaacccaaggaaggagtcaagactgagaacaacgatcatattaatttgaaggtggcggggcaggatggttctgtggtgcagtttaagattaagaggcatacaccacttagtaaactaatgaaagcctattgtgaacgacagggattgtcagtgaggcagatcagattccgattcgacgggcaaccaatcaatgaaacagacacacctgcacagttggaaatggaggatgaagatacaattgatgtgttccaacagcagacgggaggtgtctactgaaaagggaacctgcttctttactccagaactctgttctttaaagaccaagattacattctcaattagaaaactgcaatttggttccaccacatcctgactactaccgtatagttttctctattctttcatttcccccttccctattcctttattgtacataaagtaactggtatatgtacacaagcatattgcattttttttaactaaacagccaatgatatgttttgattgacatcaagtggagatgggatggggaaaaatactgattctgtgaaaataccccctttctccattagtggcatgctcattcagctcttatctttatattccagtaagttattttgctctcactgttttaacaaaaacaacaacaacaacaacataaaaatccttgcatacctttttcaattggagaattttaatgattttcatttatcattgtaaaaccaaggacaattttataactttttcgtacatagctgctacatgtagggcaatctgtctttaagtagggataaattactctaaaacaaaaaagaatcctagatacttttcccttcaagtcaagcgtcttgtttaaataaactgcttgtttaaaatg

SEQ ID NO: 6266 - protein, 95 aa, Homo sapiens [sequence omitted]

SEQ ID NO: 6267 - DNA, 507 bp, Homo sapiens
gcgcaccctctgccctggtccatcgctgccgcctccttcttctgcagctcctggtgctgcttgtgtgctcgtttggtgcggacctggtacctcttttgtgaaacggcagctgaggagattccggcgcttgccatggccgacgaaaaacccaaggaaggagtcaagactgagaacaacgatcatattaatttgaaggtggcggggcaggatggttctgtggtgcagtttaagattaagaggcatacaccacttagtaaactaatgaaagcctattgtgaacgacagtggaaatggaggatgaagatacaattgatgtgttccaacagcagacgggaggtgtctactgaaaagggaacctgcttctttactccagaactctgttctttaaagaccaagattacattctcaattagaaaactgcaatttggttccaccacatcctgactactaccgtatagttttctctattctttcatttcccccttccctattcctttattgtacata

SEQ ID NO: 6268 - DNA, 677 bp, Homo sapiens
cacaacaaacaggccactgagaatacaaaggaggaagtgaaaactatgtgagaagatggcccagtctgatgctaaaaagtttgtggaaagccagcctaaaaaggacacaccacggaaagagaagcgttcacgggaagagaagcagaagccccaggctgagcaggaggagaaaaaggcggctgcccctactcctgaggaggagatggatgaatgtgagcaggcgctggccgctgagcccaaggccaaggacccctttgctcacctgcccaagagtacctttgtgttggatgaattgaagctcaagtactccaatgagacacactctctgtggcactgccatatttctgggagcactttgataaggactgctggtccctgtggtactcagagtgtcgcttccctgaagaattcactcagaccttcatgagctgcaatctcatcactggaatgttccagtgactggacaagctgaggaagaatgccttcgccagtgtcatcctctttggaaccaacaatatcagctccatttctggagtctgggtcttccgaggccaggagcttgcctttccactgagtccagattggcaggtgggctatgagtcatacacatggcagaaactggatcctggcagcgaggagacccagatgctggttcgagagtacttttcctgggaggg

SEQ ID NO: 6269 - DNA, 3010 bp, Homo sapiens
atctttaaatggatgagatggctaccactcagatttccaaagatgagcttgatgaactcaaagaggcctttgcaaaagttgatctcaacagcaacggattcatttgtgactatgaacttcatgagctcttcaaggaagctaatatgccattaccaggatataaagtgagagaaattattcagaaactcatgctggatggtgacaggaataaagatgggaaaataagttttgacgaatttgtttatatttttcaagaggtaaaaagtagtgatattgccaagaccttccgcaaagcaatcaacaggaaagaaggtatttgtgctctgggtggaacttcagagttgtccagcgaaggaacacagcattcttactcagaggaagaaaaatatgcttttgttaactggataaacaaagctttggaaaatgatcctgattgtagacatgttataccaatgaaccctaacaccgatgacctgttcaaagctgttggtgatggaattgtgctttgtaaaatgattaacctttcagttcctgataccattgatgaaagagcaatcaacaagaagaaacttacacccttcatcattcaggaaaacttgaacttggcactgaactctgcttctgccattgggtgtcatgttgtgaacattggtgcagaagatttgagggctgggaaacctcatctggttttgggactgctttggcagatcattaagatcggtttgttcgctgacattgaattaagcaggaatgaagccttggctgctttactccgagatggtgagactttggaggaacttatgaaattgtctccagaagagcttctgcttagatgggcaaactttcatttggaaaactcgggctggcaaaaaattaacaactttagtgctgacatcaaggattccaaagcctatttccatcttctcaatcaaatcgcaccaaaaggacaaaaggaaggtgaaccacggatagatattaacatgtcaggtttcaatgaaacagatgatttgaagagagctgagagtatgcttcaacaagcagataaattaggttgcagacagtttgttacccctgctgatgttgtcagtggaaaccccaaactcaacttagctttcgtggctaacctgtttaataaatacccagcactaactaagccagagaaccaggatattgactggactctattagaaggagaaactcgtgaagaaagaaccttccgtaactggatgaactctcttggtgtcaatcctcacgtaaaccatctctatgctgacctgcaagatgccctggtaatcttacagttatatgaacgaattaaagttcctgttgactggagtaaggttaataaacctccatacccgaaactgggagccaacatgaaaaagctagaaaactgcaactatgctgttgaattagggaagcatcctgctaaattctccctggttggcattggagggcaagacctgaatgatgggaaccaaaccctgactttagctttagtctggcagctgatgagaagatataccctcaatgtcctggaagatcttggagatggtcagaaagccaatgacgacatcattgtgaactgggtgaacagaacgttgagtgaagctggaaaatcaacttccattcagagttttaaggacaagacgatcagctccagtttggcagttgtggatttaattgatgccatccagccaggctgtataaactatgaccttgtgaagagtggcaatctaacagaagatgacaagcacaataatgccaagtatgcagtgtcaatggctagaagaatcggagccagagtgtatgctctccctgaagaccttgtggaagtaaagcccaagatggtcatgactgtgtttgcatgtttgatgggcaggggaatgaagagagtgtaaaataaccaatctgaataaaacagccatgctcccaggtgcatgattcgcaggtcagctatttccaggtgaagtgcttatggcttaaggaactcttggccattcaaaggacttttcattttgattaacaggactagcttatcatgagagccctcaggggaaagggtttaagaaaaacaactcctctttcccatagtcagagttgaatttgtcaggcacgcctgaaatgtgctcatagccaaaacattttactctctcctcctagaatgctgcccttgacatttcccattgctgtatgttatttcttgctctgttatcttttgccctcttagaatgtccctctcttgggacttgcttagatgatgggatatgaatattattagacagtaattttgctttccatccagtatgctagttcttattcgagaactatggtcagagcgtatttggatatgagtatcctttgcttatctttgtagtactgaaaatttgccgaagtaactggctgtgcagaatgtaatagaagcttttcttattcttttattcttaagatcagtatctttttacagtattctttctacatgatccttttttgtacatttaagaatattttgattatattaaacaagactgctgattttgctactttttttaaggggtcttcaagtaagtaaaacatacatcgtagctagaagaaaaatgtaccttaaatttgcatcttccctctcatacccaagctgtaaacaattgaaatattttgtcttaaatcacttggttcaatacatgcttatttgttttaaaacctgtatcatcaaactctctctctaaatttaaaatgctgttgaatatgatacttttgaggagagagtgtgctcagaacttagacgggatttggtaggccaagtatgctaagtgtacaatatattttttaattttacacctgaaacaaagaaatgtggtcactaaaaataaaagtatatatgtaggaattaatgtactcttgctttgtcaagctgtttgctatagtttccaaggtattatgttactctaactctgaaaagtgatgtaatctggtagcaatgtagtagttcaaataaaggcatttacataat

SEQ ID NO: 6270 - DNA, 4039 bp, Homo sapiens
tgccaaggctccagcccggccgggctccgaggcgagaggctgcatggagtggccggcgcggctctgcgggctgtgggcgctgctgctctgcgccggcggcgggggcgggggcgggggcgccgcgcctacggaaactcagccacctgtgacaaatttgagtgtctctgttgaaaacctctgcacagtaatatggacatggaatccacccgagggagccagctcaaattgtagtctatggtattttagtcattttggcgacaaacaagataagaaaatagctccggaaactcgtcgttcaatagaagtacccctgaatgagaggatttgtctgcaagtggggtcccagtgtagcaccaatgagagtgagaagcctagcattttggttgaaaaatgcatctcacccccagaaggtgatcctgagtctgctgtgactgagcttcaatgcatttggcacaacctgagctacatgaagtgttcttggctccctggaaggaataccagtcccgacactaactatactctctactattggcacagaagcctggaaaaaattcatcaatgtgaaaacatctttagagaaggccaatactttggttgttcctttgatctgaccaaagtgaaggattccagttttgaacaacacagtgtccaaataatggtcaaggataatgcaggaaaaattaaaccatccttcaatatagtgcctttaacttcccgtgtgaaacctgatcctccacatattaaaaacctctccttccacaatgatgacctatatgtgcaatgggagaatccacagaattttattagcagatgcctattttatgaagtagaagtcaataacagccaaactgagacacataatgttttctacgtccaagaggctaaatgtgagaatccagaatttgagagaaatgtggagaatacatcttgtttcatggtccctggtgttcttcctgatactttgaacacagtcagaataagagtcaaaacaaataagttatgctatgaggatgacaaactctggagtaattggagccaagaaatgagtataggtaagaagcgcaattccacactctacataaccatgttactcattgttccagtcatcgtcgcaggtgcaatcatagtactcctgctttacctaaaaaggctcaagattattatattccctccaattcctgatcctggcaagatttttaaagaaatgtttggagaccagaatgatgatactctgcactggaagaagtacgacatctatgagaagcaaaccaaggaggaaaccgactctgtagtgctgatagaaaacctgaagaaagcctctcagtgatggagataatttatttttaccttcactgtgaccttgagaagattcttcccattctccatttgttatctgggaacttattaaatggaaactgaaactactgcaccatttaaaaacaggcagctcataagagccacaggtctttatgttgagtcgcgcaccgaaaaactaaaaataatgggcgctttggagaagagtgtggagtcattctcattgaattataaaagccagcaggcttcaaactaggggacaaagcaaaaagtgatgatagtggtggagttaatcttatcaagagttgtgacaacttcctgagggatctatacttgctttgtgttctttgtgtcaacatgaacaaattttatttgtaggggaactcatttggggtgcaaatgctaatgtcaaacttgagtcacaaagaacatgtagaaaacaaaatggataaaatctgatatgtattgtttgggatcctattgaaccatgtttgtggctattaaaactcttttaacagtctgggctgggtccggtggctcacgcctgtaatcccagcaatttgggagtccgaggcgggcggatcactcgaggtcaggagttccagaccagcctgaccaaaatggtgaaacctcctctctactaaaactacaaaaattaactgggtgtggtggcgcgtgcctgtaatcccagctactcgggaagctgaggcaggtgaattgtttgaacctgggaggtggaggttgcagtgagcagagatcacaccactgcactctagcctgggtgacagagcaagactctgtctaaaaaacaaaacaaaacaaaacaaaacaaaaaaacctcttaatattctggagtcatcattcccttcgacagcattttcctctgctttgaaagccccagaaatcagtgttggccatgatgacaactacagaaaaaccagaggcagcttctttgccaagacctttcaaagccattttaggctgttaggggcagtggaggtagaatgactccttgggtattagagtttcaaccatgaagtctctaacaatgtattttcttcacctctgctactcaagtagcatttactgtgtctttggtttgtgctaggcccccgggtgtgaagcacagaccccttccaggggtttacagtctatttgagactcctcagttcttgccacttttttttttaatctccaccagtcatttttcagaccttttaactcctcaattccaacactgatttccccttttgcattctccctccttcccttccttgtagccttttgactttcattggaaattaggatgtaaatctgctcaggagacctggaggagcagaggataattagcatctcaggttaagtgtgagtaatctgagaaacaatgactaattcttgcatattttgtaacttccatgtgagggttttcagcattgatatttgtgcattttctaaacagagatgaggtggtatcttcacgtagaacattggtattcgcttgagaaaaaaagaatagttgaacctatttctctttctttacaagatgggtccaggattcctcttttctctgccataaatgattaattaaatagcttttgtgtcttacattggtagccagccagccaaggctctgtttatgcttttggggggcatatattgggttccattctcacctatccacacaacatatccgtatatatcccctctactcttacttcccccaaatttaaagaagtatgggaaatgagaggcatttcccccaccccatttctctcctcacacacagactcatattactggtaggaacttgagaactttatttccaagttgttcaaacatttaccaatcatattaatacaatgatgctatttgcaattcctgctcctaggggaggggagataagaaaccctcactctctacaggtttgggtacaagtggcaacctgcttccatggccgtgtagaagcatggtgccctggcttctctgaggaagctggggttcatgacaatggcagatgtaaagttattcttgaagtcagattgaggctgggagacagccgtagtagatgttctactttgttctgctgttctctagaaagaatatttggttttcctgtataggaatgagattaattcctttccaggtattttataattctgggaagcaaaacccatgcctccccctagccatttttactgttatcctatttagatggccatgaagaggatgctgtgaaattcccaacaaacattgatgctgacagtcatgcagtctgggagtggggaagtgatcttttgttcccatcctcttcttttagcagtaaaatagctgagggaaaagggagggaaaaggaagttatgggaatacctgtggtggttgtgatccctaggtcttgggagctcttggaggtgtctgtatcagtggatttcccatcccctgtgggaaattagtaggctcatttactgttttaggtctagcctatgtggattttttcctaacatacctaagcaaacccagtgtcaggatggtaattcttattctttcgttcagttaagtttttcccttcatctgggcactgaagggatatgtgaaacaatgttaacatttttggtagtcttcaaccagggattgtttctgtttaacttcttataggaaagcttgagtaaaataaatattgtctttttgtatgtcaagcgggccgccaccgcggtggaaactccagctt

SEQ ID NO: 6271 - protein, 427 aa, Homo sapiens
MEWPARLCGLWALLLCAGGGGGGGGAAPTETQPPVTNLSVSVENLCTVIWTWNPPEGASSNCSLWYFSHFGDKQDKKIAPETRRSIEVPLNERICLQVGSQCSTNESEKPSILVEKCISPPEGDPESAVTELQCIWHNLSYMKCSWLPGRNTSPDTNYTLYYWHRSLEKIHQCENIFREGQYFGCSFDLTKVKDSSFEQHSVQIMVKDNAGKIKPSFNIVPLTSRVKPDPPHIKNLSFHNDDLYVQWENPQNFISRCLFYEVEVNNSQTETHNVFYVQEAKCENPEFERNVENTSCFMVPGVLPDTLNTVRIRVKTNKLCYEDDKLWSNWSQEMSIGKKRNSTLYITMLLIVPVIVAGAIIVLLLYLKRLKIIIFPPIPDPGKIFKEMFGDQNDDTLHWKKYDIYEKQTKEETDSVVLIENLKKASQ

SEQ ID NO: 6272 - DNA, 1890 bp, Homo sapiens
gacccacgcgtccggggaggagaaagtggcgagttccggatccctgcctagcgcggcccaacctttactccagagatcatggctgccgaggatgtggtggcgactggcgccgacccaagcgatctggagagcggcgggctgctgcatgagattttcacgtcgccgctcaacctgctgctgcttggcctctgcatcttcctgctctacaagatcgtgcgcggggaccagccggcggccagcggcgacagcgacgacgacgagccgccccctctgccccgcctcaagcggcgcgacttcacccccgccgagctgcggcgcttcgacggcgtccaggacccgcgcatactcatggccatcaacggcaaggtgttcgatgtgaccaaaggccgcaaattctacgggcccgaggggccgtatggggtctttgctggaagagatgcatccaggggccttgccacattttgcctggataaggaagcactgaaggatgagtacgatgacctttctgacctcactgctgcccagcaggagactctgagtgactgggagtctcagttcactttcaagtatcatcacgtgggcaaactgctgaaggagggggaggagcccactgtgtactcagatgaggaagaaccaaaagatgagagtgcccggaaaaatgattaaagcattcagtggaagtatatctatttttgtattttgcaaaatcatttgtaacagtccactctgtctttaaaacatagtgattacaatatttagaaagttttgagcacttgctataagttttttaattaacatcactagtgacactaataaaattaacttcttagaatgcatgatgtgtttgtgtgtcacaaatccagaaagtgaactgcagtgctgtaatacacatgttaatactgtttttcttctatctgtagttagtacaggatgaatttaaatgtgtttttcctgagagacaaggaagacttgggtatttcccaaaacaggtaaaaatcttaaatgtgcaccaagagcaaaggatcaacttttagtcatgatgttctgtaaagacaacaaatccctttttttttctcaattgacttaactgcatgatttctgttttatctacctctaaagcaaatctgcagtgttccaaagactttggtatggattaagcgctgtccagtaacaaaatgaaatctcaaaacagagctcagctgcaaaaaagcatattttctgtgtttctggactgcactgttgtccttgccctcacatagacactcagacaccctcacaaacacagtagtctatagttaggattaaaataggatctgaacattcaaaagaaagctttggaaaaaaagagctggctggcctaaaaacctaaatatatgatgaagattgtaggactgtcttcccaagccccatgttcatggtggggcaatggttatttggttattttactcaattggttactctcatttgaaatgagggagggacatacagaataggaacaggtgtttgctctcctaagagccttcatgcacacccctgaaccacgaggaaacagtacagtcgctagtcaagtggtttttaaagtaaagtatattcataaggtaacagttattctgttgttataaaactatacccactgcaaaagtagtagtcaagtgtctaggtctttgatattgctcttttggttaacactaagcttaagtagactatacagttgtatgaatttgtaaaagtatatgaacacctagtgagatttcaaacttgtaattgtggttaaatagtcattgtattttcttgtgaactgtgttttatgattttacctcaaatcagaaaacaaaatgatgtgctttggtcagttaataaaaatggttttacccactaaaaaaaaaaaaa

SEQ ID NO: 6273 - protein, 195 aa, Homo sapiens
MAAEDVVATGADPSDLESGGLLHEIFTSPLNLLLLGLCIFLLYKIVRGDQPAASGDSDDDEPPPLPRLKRRDFTPAELRRFDGVQDPRILMAINGKVFDVTKGRKFYGPEGPYGVFAGRDASRGLATFCLDKEALKDEYDDLSDLTAAQQETLSDWESQFTFKYHHVGKLLKEGEEPTVYSDEEEPKDESARKND

SEQ ID NO: 6274 - DNA, 1225 bp, Homo sapiens
ccgcagcgccggagtcaaagccggttcccggcccagtcccgtcctgcagcagtctgcctcctctttcaacatgacagatgccgctgtgtccttcgccaaggacttcctggcaggtggagtggccgcagccatctccaagacggcggtagcgcccatcgagcgggtcaagctgctgctgcaggtgcagcatgccagcaagcagatcactgcagataagcaatacaaaggcattatagactgcgtggtccgtattcccaaggagcagggagttctgtccttctggcgcggtaacctggccaatgtcatcagatacttccccacccaggctcttaacttcgccttcaaagataaatacaagcagatcttcctgggtggtgtggacaagagaacccagttttggctctactttgcagggaatctggcatcgggtggtgccgcaggggccacatccctgtgttttgtgtaccctcttgattttgcccgtacccgtctagcagctgatgtgggtaaagctggagctgaaagggaattccgaggcctcggtgactgcctggttaagatctacaaatctgatgggattaagggcctgtaccaaggctttaacgtgtctgtgcagggtattatcatctaccgagccgcctacttcggtatctatgacactgcaaagggaatgcttccggatcccaagaacactcacatcgtcatcagctggatgatcgcacagactgtcactgctgttgccgggttgacttcctatccatttgacactgttcgccgccgcatgatgatgcagtcagggcgcaaaggaactgacatcatgtacacaggcacgcttgactgctggcggaagattgctcgtgatgaaggaggcaaagcttttttcaagggtgcatggtccaatgttctcagaggcatgggtggtgcttttgtgcttgtcttgtatgatgaaatcaagaagtacacataagttatttcctaggatttttccccctgtgaacaggcatgttgtattatataacatatcttgagcattcttgacagactcctggctgtcagtttctcagtggcaactatttactggttgaaaatgggaagcaataatattcatctgaccagttttctcttaaagccatttccatgatgatgatgatgggactcaattgtattttttatttcagtcactcctgataaataacaaatttggagaaataaaaatatctaaaat

SEQ ID NO: 6275 - DNA, 1549 bp, Homo sapiens
gcgaccctcttcttggcgtagagttttcagattgctcttgggaatcatgccgaaagtagtgtctcggtcagtagtctgctctgacactcgggaccgggaggaatatgacgacggcgagaagcccctccatgtttactactgtttgtgcggccagatggtcctagtgctggactgccagttagagaaattgcccatgaggccccgggaccggtcccgtgtgattgatgctgccaaacatgcccataagttttgtaacacagaagatgaggagactatgtatctgcggagacctgaaggcattgaacgacagtacaggaagaaatgtgcaaagtgtggactgccgctcttctaccaatcccagccaaagaatgctcctgttaccttcattgtggatggagcagtagtcaagtttggccagggctttgggaaaacgaacatatatactcagaaacaagagcctcctaagaaggtgatgatgaccaaacggaccaaagacatgggcaagttcagttctgtcaccgtgtctaccattgatgaagaggaagaggagattgaggctagggaagttgctgactcatatgcacagaatgccaaagtgattgaaaaacagctggagcgcaaaggcatgagcaagaggcgactgcaagagctggctgaattggaagccaagaaagcgaaaatgaaggggaccttgattgacaaccagttcaaataaccaggcctttttctaagccctagactagaggcaagcatttagatcaggaggcaaagtaatttcttgattacatagacggattcctatttatgccctagcagaaggctttacgttgtttcccattgattctcctacattcagtgaggtctttaactgagtccatttaacttgctttcttttttttttttttttttttgagataaagtcttgctctttcgcccaggatggagtgcagtggtgcgatctcggctcactgcaacctccgcctcccgggttcaagcagttctcctgcctcagcctcctgagtagctgggattacaggcatgtgccaccacgcctgggcaacatggtgaaaccctgtctctactaaaatacaaaagaaattagccaggtgtggcggcatacccctgtagtcacggctacttgggaggcagaggcaggagaattgcttgaactcgggaggtggaggttgcagtgagctgagattgcaccactgtactccagcactccagcctgggcgacagagtgagactctgtctctacaaaaaaaaaaaaaaaaaaaagtaacccaagggagggagctaccctctagtcgggcagctgatactgcttccttgcatggatacatgggagggagacgttatagattaagaaatgatagcaagataaacaaaatgatttgttgggtatcttttactttacatttgttatttgcagaggagtgttgtatatatagatgttattttatgtcacactgcttcaatgatacctatatccatgtgtttgtatccatgtttttatccattcaactgtattaaaaggtgttgggacagg

SEQ ID NO: 6276 - DNA, 2695 bp, Homo sapiens
gaagaactggaactgggctggccatagggggaagcggcgcgttaaatccgccccctctccataccctactttcaaggggtgggcggtagaggggaggttggggttggagcagcggcgagggggcccctcccttgcacctccccccaccggacttggtcgcgcccgaagtgtaacactttctctttgtcggaggagctcctctgtttcctgtgcagtagctcccgttgcggcggcacccgtggcagccctggcggacgcaggagcgatggcagcgaccgatatagctcgccaggtgggtgaaggttgccgaactgtccccctggctggacatgtggggtttgacagcttgcctgaccagctggtgaataagtccgtcagccagggcttctgcttcaacatcctgtgcgtgggagagacaggtttgggcaagtccaccctcatggacaccctgttcaacaccaaattcgaaggggagccagccacccacacacagccgggtgtccagctccagtctaatacctatgacctccaagagagcaacgtgaggctaaagctcacgatcgttagcacagttggctttggggaccagatcaacaaagaggacagctacaagcctatcgtggaattcatcgatgcacaattcgaggcctacctgcaggaagagctaaagatccgaagagtgctacacacctaccatgactcccgaatccatgtctgcttgtatttcattgcccccacgggtcattccctgaagtctctggacctagtgactatgaagaagctggacagtaaggtgaacatcatccccatcattgccaaagcagatgccatttcgaagagtgagctaacaaagttcaaaatcaaaatcaccagcgagcttgtcagcaacggagtccagatctatcagtttcctacagatgatgagtcggtggcagagatcaatggaaccatgaacgcccacctgccgtttgctgtcattggcagcacagaagaactgaagataggcaacaagatgatgagggcgcggcagtatccttggggcactgtgcaggttgaaaacgaggcccactgcgactttgtgaagctgcgggagatgctgattcgggtcaacatggaggatctgcgggagcagacccacacccggcactatgagctgtatcgccgctgtaagctggaggagatgggcttcaaggacaccgaccctgacagcaaacccttcagtttacaggagacatatgaggccaaaaggaacgagttcctaggggaactccagaaaaaagaagaggagatgagacagatgttcgtccagcgagtcaaagagaaagaagcggagctcaaagaggcagagaaagagctgcacgagaagtttgaccgtctgaagaaactgcaccaggacgagaagaagaaactggaggataagaagaaatccctggatgatgaagtgaatgctttcaagcaaagaaagacggcggctgagctgctccagtcccagggctcccaggctggaggctcacagactctgaagagagacaaagagaagaaaaataatccatggctgtgtactgaatagtattccccgctacagctggactggactccatttagccttttaagccgaggttcctattttaactgacagctttcctttggggtgccaggcagcgaggccccccacccctatcctgccatgtacttcaagctcacttcttctttttgagttccgcaacttgctcctgcctcccagccccactggcactgaccatgaccacctacttctattttttttttagagtttctttttttgatcacttactttcaaagcacacagtcaaacaaggttatgccaaatttccaggcctttttgaagtattgagaaggggaaggggatttctcacttcaattatagatcataataggaagcaaaaagaaaaaaatgaaaagcaaacatatgcacgcacttttcttgttgacaaagcaagaatgtaggtttgctgtgtaggtttggtgctctattgattggtgagtgaccagagcaagtatgaaggtgatgctgccaaagcacaagccagtttcttgggaaaattcaagttacagtggagtatttttttgaagaccatatgcttggaggtagaaacaaaccaacgaccaaaaaaaaaaaaaaaaaaaaatctgctcagatactcagccagtagctcagagagatgctgagttaggcctgtcaggtctccttgggaaaggcttcatatttgcaactttgatgattctatgtccagcttcagagctgctttcccagaaattcacgcttaaacaaccaaccggtaaccaccacttccccacaccgccgcctggtaattatttgcattacaaaccggaggcgccctcatttgcatttgtgtacagattaactagttaaggcttgagaagctctgaataattcaaaagtattagacccacacagccttggagagaccttcagaaactaaggaggagttttatattaagggagacattttagtcagtaagacgatataacctacttactccgtaaggggaaatgaaggcccggagaagggaagggacttgaccgaggtcccacttctgtttcgaggcagaagccagactaattttcatgcctcctgactcccaatcagtttcacaaagggattcaatctgtttatatacgttacattcctgg

SEQ ID NO: 6277 - protein, 434 aa, Homo sapiens
MAATDIARQVGEGCRTVPLAGHVGFDSLPDQLVNKSVSQGFCFNILCVGETGLGKSTLMDTLFNTKFEGEPATHTQPGVQLQSNTYDLQESNVRLKLTIVSTVGFGDQINKEDSYKPIVEFIDAQFEAYLQEELKIRRVLHTYHDSRIHVCLYFIAPTGHSLKSLDLVTMKKLDSKVNIIPIIAKADAISKSELTKFKIKITSELVSNGVQIYQFPTDDESVAEINGTMNAHLPFAVIGSTEELKIGNKMMRARQYPWGTVQVENEAHCDFVKLREMLIRVNMEDLREQTHTRHYELYRRCKLEEMGFKDTDPDSKPFSLQETYEAKRNEFLGELQKKEEEMRQMFVQRVKEKEAELKEAEKELHEKFDRLKKLHQDEKKKLEDKKKSLDDEVNAFKQRKTAAELLQSQGSQAGGSQTLKRDKEKKNNPWLCTE

SEQ ID NO: 6278 - DNA, 401 bp, Rattus norvegicus
cttccgccagcttccctcctcttcctttctccgccatcgtggtgtgttcttgactccgctgctcgccatgtcttctcacaagactttcaggattaagcgattcctggccaagaaacaaaagcaaaatcgtcccattccccagtggattcggatgaaaactggaaataaaatcaggtacaactccaaaaggagacattggagaagaaccaagctgggtctataaggaattgcacatgagatggcacacatatttatgctgtctgaaggtcacgatcatgttaccatatcaagctgaaaatgtcaccactatctggagatttcgacgtgttttcctctctgaatctgttatgaacacgttggttggctggattcagtaataaatatgtaaggcctttcttttt

SEQ ID NO: 6279 - protein, 51 aa, Rattus norvegicus [sequence omitted]

SEQ ID NO: 6280 - DNA, 475 bp, Homo sapiens
agattccgtcgcttcttccggagccgtacgtggcaccgccccgctcgcgggcggccgcggggcttgctgggaagagaggcgaagccaggtcacctttcaaggacccagaagtagggttttggcctaggtaacggggcagagatgtggttcgagattctccccggactctccgtcatgggcgtgtgcttgttgattccaggactggctactgcgtacatccacaggttcactaacgggggcaaggaaaaaagggttgctcattttgggtatcactggagtctgatggaaagagataggcgcatctctggagttgatcgttactatgtgtcaaagggtttggagaacattgattaaggaagcattttcctgattgatgaaaaaaataactcagttatggccatctacccctgctagaaggttacagtgtattatgtagcatgcaatgtgttatgtagtgcttaataaaaataaaatg

SEQ ID NO: 6281 - DNA, 405 bp, Homo sapiens
atggacgtagacacacgagcctatttcacctccgctaccataatcatcgctattcccaccagcgtcaaactgactcgctacactctacggaagcaatatgaagtgatctgctgcagtactctgagccctagggttcatttttctcttcactgtggcctaaccggcattgtactagcaaactcatcattagacatcgtactacacgacacatactacgtcgtagctcacttccattacgtcctatcaataggagctgtattcgccatcacaggagccaatattgtacctatcaccatactagtctttgctgcctgcaaggcagcagtaggcctagccctactagtctcaatctctaacacatatggcctagactacgtacataacctaagcctactccaatgctaa

SEQ ID NO: 6282 - DNA, 1678 bp, Homo sapiens
caggaggagacagcctcccggcccggggaggacaagtcgctgccacctttggctgccgacgtgattccctgggacggtccgtttcctgccgtcagctgccggccgagttgggtctccgtggttcaggccggctcccccttcctggtctcccttctcccgctgggccggtttatcgggaggagattgtcttccagggctagcaattggacttttgatgatgtttgacccagcggcaggaatagcaggcaacgtgatttcaaagctgggctcagcctctgtttcttctctcgtgtaatcgcaaaacccattttggagcaggaattccaatcatgtctgtgatggtggtgagaaagaaggtgacacggaaatgggagaaactcccaggcaggaacaccttttgctgtgatggccgcgtcatgatggcccggcaaaagggcattttctacctgacccttttcctcatcctggggacatgtacactcttcttcgcctttgagtgccgctacctggctgttcagctgtctcctgccatccctgtatttgctgccatgctcttccttttctccatggctacactgttgaggaccagcttcagtgaccctggagtgattcctcgggcgctaccagatgaagcagctttcatagaaatggagatagaagctaccaatggtgcggtgccccagggccagcgaccaccgcctcgtatcaagaatttccagataaacaaccagattgtgaaactgaaatactgttacacatgcaagatcttccggcctccccgggcctcccattgcagcatctgtgacaactgtgtggagcgcttcgaccatcactgcccctgggtggggaattgtgttggaaagaggaactaccgctacttctacctcttcatcctttctctctccctcctcacaatctatgtcttcgccttcaacatcgtctatgtggccctcaaatctttgaaaattggcttcttggagacattgaaagaaactcctggaactgttctagaagtcctcatttgcttctttacactctggtccgtcgtgggactgactggatttcatactttcctcgtggctctcaaccagacaaccaatgaagacatcaaaggatcatggacagggaagaatcgcgtccagaatccctacagccatggcaatattgtgaagaactgctgtgaagtgctgtgtggccccttgccccccagtgtgctggatcgaaggggtattttgccactggaggaaagtggaagtcgacctcccagtactcaagagaccagtagcagcctcttgccacagagcccagcccccacagaacacctgaactcaaatgagatgccggaggacagcagcactcccgaagagatgccacctccagagcccccagagccaccacaggaggcagctgaagctgagaagtagcctatctatggaagagacttttgtttgtgtttaattagggctatgagagatttcaggtgagaagttaaacctgagacagagagcaagtaagctgtcccttttaactgtttttctttggtctttagtcacccagttgcacactggcattttcttgctgcaagcttttttaaatttctgaactcaaggcagtggcagaagatgtcagtcacctctgataactggaaaaatgggtctcttgggccctggcactggtt

SEQ ID NO: 6283 - protein, 382 aa, Homo sapiens
LFLLSCNRKTHFGAGIPIMSVMVVRKKVTRKWEKLPGRNTFCCDGRVMMARQKGIFYLTLFLILGTCTLFFAFECRYLAVQLSPAIPVFAAMLFLFSMATLLRTSFSDPGVIPRALPDEAAFIEMEIEATNGAVPQGQRPPPRIKNFQINNQIVKLKYCYTCKIFRPPRASHCSICDNCVERFDHHCPWVGNCVGKRNYRYFYLFILSLSLLTIYVFAFNIVYVALKSLKIGFLETLKETPGTVLEVLICFFTLWSVVGLTGFHTFLVALNQTTNEDIKGSWTGKNRVQNPYSHGNIVKNCCEVLCGPLPPSVLDRRGILPLEESGSRPPSTQETSSSLLPQSPAPTEHLNSNEMPEDSSTPEEMPPPEPPEPPQEAAEAEK

SEQ ID NO: 6284 - DNA, 2512 bp, Homo sapiens
tgctttccttcggcttccgttcttggtccatgtgagagaagctggctgctgaaatgactgcgaaccggcttgcagagagccttctggctttgagccaacaggaagaactagcggatttgccaaaagactacctcttgagtgagagtgaagatgagggggacaatgatggagagagaaagcatcaaaagcttctggaagcaatcagttcccttgatggaaagaataggcggaaattggctgagaggtctgaggctagtctgaaggtgtcagagttcaatgtcagttctgaaggatcaggagaaaagctggtccttgcagatctgcttgagcctgttaaaacttcatcttctttggccactgtgaaaaagcaactgagtagagtcaaatcaaagaagacagtggagttacctctgaacaaagaagagattgaacggatccacagagaagtagcattcaataaaaccgcacaagtcctctccaaatgggaccctgtcgtcctgaagaaccggcaggcagagcagctggtttttcccctggagaaagaggagccagccattgctcccattgaacatgtgctcagtggctggaaggcaagaactcccctggagcaggaaattttcaacctcctccataagaacaagcagccagtgacagaccctttactgacccctgtggaaaaggcctctctccgagccatgagcctagaagaggcaaagatgcgacgagcagagcttcagagggctcgggctctgcagtcctactatgaggccaaggctcgaagagagaagaaaatcaaaagtaaaaagtatcacaaagtcgtgaagaaaggaaaggccaagaaagccctaaaagagtttgagcagctgcggaaggttaatccagctgcagcactagaagaactggaaaaaattgaaaaggccagaatgatggaaagaatgagccttaagcaccaaaacagtgggaaatgggccaagtcaaaggcaattatggccaaatatgacctggaggctcgccaagctatgcaggaacagttgtctaagaacaaagaactgacacagaaactccaggtagcctctgagagtgaggaagaggagggaggcacagaagatgtggaagaactccttgtccctgatgtagtgaatgaagtgcagatgaatgcagatgggccgaatccctggatgctcaggagctgcaccagtgacaccaaagaggctgcaacccaggaggaccctgagcaactgccagagcttgaggcccatggagtttctgaaagtgagggagaagaaagaccagtggcagaagaagaaattttgttgagagaatttgaggaaaggcgatcccttagaaaaagatctgagctcagccaagatgctgagccagcaggcagtcaagaaacaaaagattctggcagccaggaggtgctgtctgaattgagagtactatctcagaaattgaaggaaaaccatcagtccaggaagcaaaaagcaagttcagaggggactattccccaggtccagagagaggaacctgccccagaagaagaggagcccctgttgctacagagaccagagagagtacagacgctggaagagctagaagagctgggaaaagaagaatgttttcaaaataaggagcttcccagacctgtgttagaagggcagcagtcagagaggaccccaaataatcgccctgatgcccctaaggagaagaaaaagaaggagcaaatgatcgacctacagaacctcctaaccacacaatctccctccgtgaagtctttggcagttcccacaatagaggagctggaagatgaagaggagagaaaccataggcagatgataaaggaagcttttgctggggatgatgtcatcagagatttcttgaaagagaagagggaagctgtggaggcgagtaagccaaaggacgtggacctgacactacctggctggggcgagtggggtggtgtgggcctaaagcccagtgccaagaaaagacgccggtttctcattaaagcccctgagggtcctccaagaaaagataagaatttgccaaatgtgattatcaatgagaagcgcaacatccacgcagctgctcatcaggtacgagtgcttccatatccatttacccaccattggcaatttgaaaggaccatccagacccccataggatccacatggaacacccagagggctttccaaaagctgactactcccaaggtcgtcaccaagccaggccatatcattaaccccataaaagcagaagacgtgggctaccggtcttcctcaaggtcggacctgtctgtcatacagaggaatccaaaacgaatcaccacacgtcacaaaaaacagctgaagaaatgctctgtagattgagttgctggaggagtgacagccaggagccctgacttcacttcctttggtccagttttactctgatacagggtggattccaaaactggctcagtacattgcatgtagttaagccacattttaaaaataaaggcattttttaatct

SEQ ID NO: 6285 - DNA, 1906 bp, Homo sapiens
agaggaaagggaaggaggaggtcccgaatagcggtcgccgaaatgttccggtgtggaggcctggcggcgggtgctttgaagcagaagctggtgcccttggtgcggaccgtgtgcgtccgaagcccgaggcagaggaaccggctcccaggcaacttgttccagcgatggcatgttcctctagaactccagatgacaagacaaatggctagctctggtgcatcagggggcaaaatcgataattctgtgttagtccttattgtgggcttatcaacagtaggagctggtgcctatgcctacaagactatgaaagaggacgaaaaaagatacaatgaaagaatttcagggttagggctgacaccagaacagaaacagaaaaaggccgcgttatctgcttcagaaggagaggaagttcctcaagacaaggcgccaagtcatgttcctttcctgctaattggtggaggcacagctgcttttgctgcagccagatccatccgggctcgggatcctggggccagggtactgattgtatctgaagatcctgagctgccgtacatgcgacctcctctttcaaaagaactgtggttttcagatgacccaaatgtcacaaagacactgcgattcaaacagtggaatggaaaagagagaagcatatatttccagccaccttctttctatgtctctgctcaggacctgcctcatattgagaatggtggtgtggctgtcctcactgggaagaaggtagtacagctggatgtgagagacaacatggtgaaacttaatgatggctctcaaataacctatgaaaagtgcttgattgcaacaggaggtactccaagaagtctgtctgccattgatagggctggagcagaggtgaagagtagaacaacgcttttcagaaagattggagactttagaagcttggagaagatttcacgggaagtcaaatcaattacgattatcggtgggggcttccttggtagcgaactggcctgtgctcttggcagaaaggctcgagccttgggcacagaagtgattcaactcttccccgagaaaggaaatatgggaaagatcctccccgaatacctcagcaactggaccatggaaaaagtcagacgagagggggttaaggtgatgcccaatgctattgtgcaatccgttggagtcagcagtggcaagttacttatcaagctgaaagacggcaggaaggtagaaactgaccacatagtggcagctgtgggcctggagcccaatgttgagttggccaagactggtggcctggaaatagactcagattttggtggcttccgggtaaatgcagagctacaagcacgctctaacatctgggtggcaggagatgctgcatgcttctacgatataaagttgggaaggaggcgggtagagcaccatgatcacgctgttgtgagtggaagattggctggagaaaatatgactggagctgctaagccgtactggcatcagtcaatgttctggagtgatttgggccccgatgttggctatgaagctattggtcttgtggacagtagtttgcccacagttggtgtttttgcaaaagcaactgcacaagacaaccccaaatctgccacagagcagtcaggaactggtatccgatcagagagtgagacagagtccgaggcctcagaaattactattcctcccagcaccccggcagttccacaggctcccgtccagggggaggactacggcaaaggtgtcatcttctacctcagggacaaagtggtcgtggggattgtgctatggaacatctttaaccgaatgccaatagcaaggaagatcattaaggacggtgagcagcatgaagatctcaatgaagtagccaaactattcaacattcatgaagactgaagccccacagtggaattggcaa

SEQ ID NO: 6286 - protein, 613 aa, Homo sapiens
MFRCGGLAAGALKQKLVPLVRTVCVRSPRQRNRLPGNLFQRWHVPLELQMTRQMASSGASGGKIDNSVLVLIVGLSTVGAGAYAYKTMKEDEKRYNERISGLGLTPEQKQKKAALSASEGEEVPQDKAPSHVPFLLIGGGTAAFAAARSIRARDPGARVLIVSEDPELPYMRPPLSKELWFSDDPNVTKTLRFKQWNGKERSIYFQPPSFYVSAQDLPHIENGGVAVLTGKKVVQLDVRDNMVKLNDGSQITYEKCLIATGGTPRSLSAIDRAGAEVKSRTTLFRKIGDFRSLEKISREVKSITIIGGGFLGSELACALGRKARALGTEVIQLFPEKGNMGKILPEYLSNWTMEKVRREGVKVMPNAIVQSVGVSSGKLLIKLKDGRKVETDHIVAAVGLEPNVELAKTGGLEIDSDFGGFRVNAELQARSNIWVAGDAACFYDIKLGRRRVEHHDHAVVSGRLAGENMTGAAKPYWHQSMFWSDLGPDVGYEAIGLVDSSLPTVGVFAKATAQDNPKSATEQSGTGIRSESETESEASEITIPPSTPAVPQAPVQGEDYGKGVIFYLRDKVVVGIVLWNIFNRMPIARKIIKDGEQHEDLNEVAKLFNIHED

SEQ ID NO: 6287 - DNA, 1283 bp, Homo sapiens
ccctcccctgcctgcattcccgggacggacccgagggaagaagcctcaggaggagggtgtgggccgaggcgcggcggcggctggagcagcgcggtagggtccttcgccagagcatccggtccgagggcgcacacaggcagaaggctcggggctcgtccactctcctccctctctcctcctctccctggctttgtgttggtgcctccgagctgcaaggagggtgcgctggaggaggaggaggggggcccggagtgagaggcacccccttcacgcgcgcgcgcgcacacggtgccggcgcacgcacacacgggcggacacacacacacgcgcgcacacacacacgcacagagctcgctcgcctcgagcgcacgaacgtggacgttctctttgtgtggagccctcaaggggggttggggccccggttcggtccgggggagatggcgcagcccatcctgggccatgggagcctgcagcccgcctcggccgctggcctggcgtccctggagctcgactcgtcgctggaccagtacgtgcagattcgcatcttcaaaataatcgtgattggggactccaacgtgggcaagacctgcctgaccttccgcttctgcgggggtaccttcccagacaagactgaagccaccatcggcgtggacttcagggagaagaccgtggaaatcgagggcgagaagatcaaggttcaggtgtgggacacagcaggtcaggaacgtttccgcaaaagcatggtcgagcattactaccgcaacgtacatgccgtggtcttcgtctatgacgtcaccaagatgacatctttcaccaacctcaaaatgtggatccaagaatgcaatgggcatgctgtgcccccactagtccccaaagtgcttgtgggcaacaagtgtgacttgagggaacagatccaggtgccctccaacttagccctgaaatttgctgatgcccacaacatgctcttgtttgagacatcggccaaggaccccaaagagagccagaacgtggagtcgattttcatgtgcttggcttgccgattgaaggcccagaaatccctgctgtatcgtgatgctgagaggcagcaggggaaggtgcagaaactggagttcccacaggaagctaacagtaaaacttcctgtccttgttgaaaccaaacgatataaatacaagataaattatcactggagttttttctttcccttttttctgtgcctgcataatgctgacacctgcttgtttccatacaaattgatatcaaaataaaatttgtatagattatc

SEQ ID NO: 6288 - protein, 237 aa, Homo sapiens
MAQPILGHGSLQPASAAGLASLELDSSLDQYVQIRIFKIIVIGDSNVGKTCLTFRFCGGTFPDKTEATIGVDFREKTVEIEGEKIKVQVWDTAGQERFRKSMVEHYYRNVHAVVFVYDVTKMTSFTNLKMWIQECNGHAVPPLVPKVLVGNKCDLREQIQVPSNLALKFADAHNMLLFETSAKDPKESQNVESIFMCLACRLKAQKSLLYRDAERQQGKVQKLEFPQEANSKTSCPC

SEQ ID NO: 6289 - DNA, 816 bp, Homo sapiens
gcccccaccctcgacatgcgcttccggcgacgccttagcgctgacccccacgcaacccagcgaaactccgcggagcgcgcgcggcacgatggacggtcgggtgcagctgatgaaggccctcctggccgggcccctccggcccgcggcgcgtcgctggaggaacccgattccctttcccgagacgtttgacggagataccgaccgactcccggagttcatcgtgcagacgagctcctacatgttcgtggacgagaacacgttctccaacgacgccctgaaggtgcaagctgggctcctgttacatactggacagaccacccacagccgctgctgccaacccacctccactcctccagactgccagccaactacatcattctgcccacagacctacgctaccactgccatcgccatccaccgcatctcaccaacagactgtggctcctagtgatgtggactcacctcggaggtatccgagctggacacagcccctggacagtgatccagacagctggccgtcccccaaggagcctgtcaccttcagcgagacccatttcctccccatccccagagacctcttgtgttcctgccacatagctgccagggcttaagtgtgcctggcaaccaaatcgaatctctcattttctcctgtggaccagttagttttgcctagaatcctgttttcttctgaatttgcagctgtctctctgatgggtgccttttgttcaacacagtaagccctgctcccttccctgctctaatacactacctgtacaaaggttttttccttatttttaataaatgtcagacactatt

SEQ ID NO: 6290 - protein, 115 aa, Homo sapiens
MHIWTLSCTSGASWAPVTYWTDHPQPLLPTHLHSSRLPANYIILPTDLRYHCHRHPPHLTNRLWLLVMWTHLGGIRAGHSPWTVIQTAGRPPRSLSPSARPISSPSPETSCVPAT

SEQ ID NO: 6291 - DNA, 573 bp, Homo sapiens
tgaaggccctcctggccgggcccctccggcccgcggcgcgtcgctggaggaacccgattccctttcccgagacgtttgacggagataccgaccgactcccggagttcatcgtgcagacgagctcctacatgttcgtggacgagaacacgttctccaacgacgccctgaagcccagcccctccatgcacatttggacgctgtcctgcacttcaggtgcaagctgggctcctgttacatactggacagaccacccacagccgctgctgccaacccacctccactcctccagactgccagccaactacatcattctgcccacagacctacgctaccactgccatcgccatccaccgcatctcaccaacagactgtggctcctagtgatgtggactcacctcggaggtatccgagctggacacagcccctggacagtgatccagacagctggccgtcccccaaggagcctgtcaccttcagcgagacccatttcctccccatccccagagacctcttgtgttcctgccacatagctgccagggcttaagtgtgcctggcaaccaaatcgaatctctc

SEQ ID NO: 6292 - protein, 133 aa, Homo sapiens
MFVDENTFSNDALKPSPSMHIWTLSCTSGASWAPVTYWTDHPQPLLPTHLHSSRLPANYIILPTDLRYHCHRHPPHLTNRLWLLVMWTHLGGIRAGHSPWTVIQTAGRPPRSLSPSARPISSPSPETSCVPAT

SEQ ID NO: 6293 - DNA, 1125 bp, Homo sapiens
cggcacgaggacagaatcaggtgatggtccagaattaagagctgtcacctgtgtcattcactcacaatggaagaaatgaagaagactgccatccggctgcccaaaggcaaacagaagcctataaagacggaatggaattcccggtgtgtccttttcacctacttccaaggggacatcagcagcgtagtggatgaacacttctccagagctctgagcaatatcaagagcccccaggaattgaccccctcgagtcagagtgaaggtgtgatgctgaaaaacgatgatagcatgtctccaaatcagtggcgttactcgtctccatggacaaagccacaaccagaagtacctgtcacaaaccgtgccgccaactgcaacttgcatgtgcctggtcccatggctgtgaatcagttctcaccgtccctggctaggagggcctctgttcggcctggggagctgtggcatttctcctccctggcgggcaccagctccttagagcctggctactctcatcccttccccgctcggcacctggttccagagccccagcctgatgggaaacgtgagcctctcctaagtctcctccagcaagacagatgcctagcccgtcctcaggaatctgccgccagggagaatggcaaccctggccagatagctggaagcacagggttgctcttcaacctgcctcccggctcagttcactataagaaactatatgtatctcgtggatctgccagtaccagccttccaaatgaaactctttcagagttagagacacctgggaaatactcacttacaccaccaaaccactggggccacccacatcgatacctgcagcatctttagtcaagttggaggagaaagacaacacttggtctaagacacggcagcaagacatccctgcatattgttccagataaaaatgaaagctgctcacacccacttgcctccccaatctgttaaacagcttcgtgtctagtatgagctcagtacttgccctgtgaaaatcccagaagcccccgctgtcaatgttccccatccacaccctgcttgctcctgtgtaacagctcagatgatgaataataataaaactgtacttttttggaaaaaaaaaaaaaaaaaaaaaaa

SEQ ID NO: 6294 - protein, 258 aa, Homo sapiens
MEEMKKTAIRLPKGKQKPIKTEWNSRCVLFTYFQGDISSVVDEHFSRALSNIKSPQELTPSSQSEGVMLKNDDSMSPNQWRYSSPWTKPQPEVPVTNRAANCNLHVPGPMAVNQFSPSLARRASVRPGELWHFSSLAGTSSLEPGYSHPFPARHLVPEPQPDGKREPLLSLLQQDRCLARPQESAARENGNPGQIAGSTGLLFNLPPGSVHYKKLYVSRGSASTSLPNETLSELETPGKYSLTPPNHWGHPHRYLQHL

SEQ ID NO: 6295 - DNA, 4837 bp, Homo sapiens
gctgtttggagtgtaccgtcctcagtaatgaatccagaagaacaaatcgtgacatggcttatatctttgggagttttagagtcccctaaaaagaccatctgtgatccggaggagtttttaaagtcctcgctgaaaaatggggtagttctgtgcaaactgatcaacagactcatgcctggctctgtggaaaagttttgtctggatccccaaactgaagctgactgcatcaacaacatcaatgacttcctgaaaggatgtgcaaccctccaagtggaaatatttgatcctgatgacctttattcaggggtcaatttctccaaggtactgagtactcttttagctgtcaacaaagcaacagaagatcagctatcagaaagaccatgtggacgttcctcttctcttagtgctgctaatacttctcagacaaacccacagggagcagtttctagcacagtttcagggctgcaaaggcagtcaaagacagtggagatgacggaaaatggaagtcatcagttgatagtaaaagcaagattcaactttaagcagactaatgaggatgaactgtcagtttgtaagggggacatcatttacgtcacacgagttgaagaaggaggctggtgggaaggcacattaaatgggagaacaggctggttccccagtaattatgtccgtgaaattaaatccagtgagagacctctctccccaaaagccgtcaaaggatttgaaactgctccacttaccaagaattattatactgtggtgttacagaacatcctggacactgaaaaagaatatgctaaagaacttcagtctcttcttgttacttacttaagacccctgcagtccaataacaatctgagtactgtggaggttacatctttactgggaaacttcgaggaagtatgcacatttcaacagacactctgccaagccttggaagaatgttcaaagtttccagaaaaccagcacaaagtaggaggttgtctactgagtctcatgcctcattttaaatctatgtatctggcttactgtgcaaaccatccttcagctgtaaatgtgctcactcagcacagtgatgagttggaacaattcatggaaaatcaaggtgcatcgagcccaggtatcctcattttaacaacaaacctcagcaaaccattcatgcgactggagaaatatgttactctcttgcaagagttagaacggcatatggaggatactcatccagatcatcaggatattctgaaagcaatcgtagcattcaaaactctcatggggcaatgtcaagatctgaggaagagaaaacagctggagttacagatactgtccgaacctattcaggcatgggaaggagaagatattaaaaacttgggaaatgtgatttttatgtcacaagtaatggtgcagtatggagcatgtgaggaaaaagaggagcggtaccttatgttattttcaaatgtcctgataatgttatctgcaagtcctcggatgagtggctttatctatcagggaaaaataccaatagcaggaacggtggtgactagattagatgaaattgaagggaatgactgcacatttgaaatcactggtaacacagtggagagaattgtggtccattgtaacaacaaccaggacttccaggaatggttggagcagctgaacagactgatcagaggacctgcctcttgcagttcattatccaaaacctcatcgtcatcatgtagtgctcattcttcttttagctctaccggacagccccgaggacccttggagcctcctcaaattataaaaccgtggagtttaagttgtctacgacctgcacctccacttagaccatcagcagcactaggttataaagagaggatgtcttatatcttaaaggagtctagtaaaagccctaaaacgatgaagaaatttcttcataaaaggaagactgagagaaaaccatcggaggaggaatatgtgattaggaaaagtacagctgctctggaagaggatgctcaaatccttaaagtgatcgaagcctactgcaccagcgcaaattttcaacaaggccatggctcaagtactcgaaaagattccattccacaagtcctactccctgaggaagagaaactcatcattgaagaaaccagaagcaacggccagaccatcatggaagaaaagagccttgttgatactgtttacgccttgaaggacgaggtcagagaactgaagcaggaaaataaaagaatgaagcaatgcctggaagaagaactgaaatcaagaagggacctagaaaagctggtgcggaggcttttgaagcaaacagatgagtgtattcgaggcgagtccagtagcaagacctcaattcttccataaccatcactgtgccactgggtggagtgtgccttcagggcatcttgaaatgtcccgctgaatgatttgactcagtttgctcacttctttggcttttgttttgtgtttgagtctctctctctctctccctctctcttctctttctctccccgctgtgtgcatatgtgtgtgcgtgcacgtgcgcgcttgggcatttgctgttgtttggttattggttggttgttcattttttttttcaacaggtgaaaaagcaggaagtggtggtagagatggcctcagagtcttttccattcagtaagaaagagaaagggaatgcaggccagttacttaaaaggtcttcagattgccttcagttcacagtgcctctgcaacagccattgccctcaggtcacattctttgggctggctgcccttgcaaagcagctggccaaggcttattaaatgtgaacccaacttttccccagggctttcctgtacctgcaagcctcttagtacttaatttaccgaaggcaaatcttccagactatggcttgagtaggatgaaagacaaacacatctgcccaatgatccagctgcccttccttagaccatcacatgcctcccctcaatcacaggttttaaaattactgccctatgttgtctataagaccaagaaaactgtagtacccttattccttttgtgtcatgtaaattgtaactcaggggggcagaagctctggtcacccacaccaacaccaaatccatcagcaaattctactggacaatcctcccttttagtagcagagttgaccgccttttcccattgcatgataggtttctttccctcattctgcctagtgtgtaagttttctatttccccagtacttttagccaaccttaccaagtggtgtgtaaactagtatgtatgtgctttgcttactttttaaaaaaatgtagttagactgtgaggagttactttatgtacgttgcatattcaaactgtgatgttttatccttcaaaacaatctgcattaagaagatattgtgccctactagacagctttcattcactttattactctctcatatatgctgtgagaagttgtaatattaattggcctctttgggtgggactctaagcagtatttgcagaaatatgcttctggtccaacttgtacatccagaacaaaagggcccctctagtagctgtgtgctggattattcaggactgattaactcaagttgctcattgaatcacatcatccactttatcccagaaactagaactgtgagaaaccaggtttagaagacagtcacagaacagcacacatccaaattcagcgccattgaaagttggcctaaggctcagtgccactcacccctccctccccaaaagacaagagaaatttggccagatggggaaggtcactggaaattgaggccaaagggctgatcagaattgcctttataatatatttgatggatgcctataaatgtgggttttgcaaatattgtttaaaaaccaaacttgaagccaggcatggtggcccacacctgtggtcccagctactcaggaggctgaggtgggaggatcatttgagcccaggaggtcaaggctgcagtgagctgtgatgacaccactgcactccaacctaggtaacagagagacacctctgtctctgaaaaaacaaaacttgaagtttgaaacccccagcttgctgaggagccctttttatttttggtactgagagtctcaaggtcccatagctacatggtacagggctgttgtctgcttgctgcacagcagaaattacaccatccacaggaaatggactatttttgcagtccaacatcagccaaccacacacagccgtgtttggaagctgaagagtaaagaaatttctaggaatggctgttgttctgttttttagcacagccatttagatataacatccttcacttaaaaattaaaaacatcagtactaccaccaccaccaacaacatcaacacagatcttcacatctgcccattctgtggttagtcaatggcttgcaataaatgtgcaaactgcatctataggaaacatttttgtgattacggaatactttagttgattgctgaaaatattgaaaggtcttcattttacagtgatgagtacatatgcatgtttcggggacttggcccttctgatgaggggccctcggtactctggataacgaagcttgtgcagagtggtaaccatgcttacacactaaactataatataaaggaaatgaagccatgttaatctgagagcagtgtcgccatagttgtgttgtttacaatactctataaatgggttcctgttgccctgtaattaaactgctgcccgtagaggcctttcagttccttttctgtccttccccttcttaacacaagctcaaattttctaacttgtttttattttgaagacttttaaaatggacattttcaatacataaaaataaacagtgctttataaaaa

SEQ ID NO: 6296 - protein, 776 aa, Homo sapiens
MNPEEQIVTWLISLGVLESPKKTICDPEEFLKSSLKNGVVLCKLINRLMPGSVEKFCLDPQTEADCINNINDFLKGCATLQVEIFDPDDLYSGVNFSKVLSTLLAVNKATEDQLSERPCGRSSSLSAANTSQTNPQGAVSSTVSGLQRQSKTVEMTENGSHQLIVKARFNFKQTNEDELSVCKGDIIYVTRVEEGGWWEGTLNGRTGWFPSNYVREIKSSERPLSPKAVKGFETAPLTKNYYTVVLQNILDTEKEYAKELQSLLVTYLRPLQSNNNLSTVEVTSLLGNFEEVCTFQQTLCQALEECSKFPENQHKVGGCLLSLMPHFKSMYLAYCANHPSAVNVLTQHSDELEQFMENQGASSPGILILTTNLSKPFMRLEKYVTLLQELERHMEDTHPDHQDILKAIVAFKTLMGQCQDLRKRKQLELQILSEPIQAWEGEDIKNLGNVIFMSQVMVQYGACEEKEERYLMLFSNVLIMLSASPRMSGFIYQGKIPIAGTVVTRLDEIEGNDCTFEITGNTVERIVVHCNNNQDFQEWLEQLNRLIRGPASCSSLSKTSSSSCSAHSSFSSTGQPRGPLEPPQIIKPWSLSCLRPAPPLRPSAALGYKERMSYILKESSKSPKTMKKFLHKRKTERKPSEEEYVIRKSTAALEEDAQILKVIEAYCTSANFQQGHGSSTRKDSIPQVLLPEEEKLIIEETRSNGQTIMEEKSLVDTVYALKDEVRELKQENKRMKQCLEEELKSRRDLEKLVRRLLKQTDECIRGESSSKTSILP

SEQ ID NO: 6297 - DNA, 1864 bp, Homo sapiens
aaaaaaaacatggttgaagcagatcgcccaggaaagctcttcattggtgggcttaatacggaaacaaatgagaaagctcttgaagcagtatttggcaaatatggacgaatagtggaagtactcttgatgaaagaccgtgaaaccaacaaatcaagaggatttgcttttgtcacctttgaaagcccagcagacgctaaggatgcagccagagacatgaatggaaagtcattagatggaaaagccatcaaggtggaacaagccaccaaaccatcatttgaaagtggtagacgtggaccgcctccacctccaagaagtagaggccctccaagaggtcttagaggtggaagaggaggaagtggaggaaccaggggacctccctcacggggaggacacatggatgacggtggatattccatgaattttaacatgagttcttccaggggaccactcccagtaaaaagaggaccaccaccaagaagtgggggtcctcctcctaagagatctgcaccttcaggaccagttcgcagtagcagtggaatgggaggaagagctcctgtatcacgtggaagagatagttatggaggtccacctcgaagggaaccgctgccctctcgtagagatgtttatttgtccccaagagatgatgggtattctactaaagacagctattcaagcagagattacccaagttctcgtgatactagagattatgcaccaccaccacgagattatacttaccgtgattatggtcattccagttcacgtgatgactatccatcaagaggatatagcgatagagatggatatggtcgtgatcgtgactattcagatcatccaagtggaggttcctacagagattcatatgagagttatggtaactcacgtagtgctccacctacacgagggcccccgccatcttatggtggaagcagtcgctatgatgattacagcagctcacgtgacggatatggtggaagtcgagacagttactcaagcagccgaagtgatctctactcaagtggtcgtgatcgggttggcagacaagaaagagggcttcccccttctatggaaagggggtaccctcctccacgtgattcctacagcagttcaagccgcggagcaccaagaggtggtggccgtggaggaagccgatctgatagagggggaggcagaagcagatactagaaacaaacaaaactttggaccaaaatcccagttcaaagaaacaaaaagtggaaactattctatcataactacccaaggactactaaaaggaaaaattgtgttactttttttaaattccctgttaagttcccctccataatttttatgttcttgtgaggaaaaaagtaaaacatgtttaattttatttgactttcgcattgcttttcaacaagcaaatgttaaatgtgttaagacttgtactagtgttgtaactttccaagtaaaagtatcccctaaaggccacttcctatctgatttttcccagcaaatgaggcaggcaattctaagatcttccacaaaacatctagccatctaaaatggagagatgaatcattctacctatacaaacaagctagctattagagggtggttggggtatgctactcataagatttcagggtgtcttccaactgaaatctcaatgttctcagtacgaaaaacctgaaatcacatgcctatgtaaggaaagtgctattcacccagtaaacccaaaaaagcaaatggataatgctggccattttgcctttctgacatttccttgggaatctgcaagaacctcccctttcccttcccccaataagaccatttaagtgtgtgttaaacaactacagaatactaaataaaaagtttggccaaaacc

SEQ ID NO: 6298 - protein, 391 aa, Homo sapiens
MVEADRPGKLFIGGLNTETNEKALEAVFGKYGRIVEVLLMKDRETNKSRGFAFVTFESPADAKDAARDMNGKSLDGKAIKVEQATKPSFESGRRGPPPPPRSRGPPRGLRGGRGGSGGTRGPPSRGGHMDDGGYSMNFNMSSSRGPLPVKRGPPPRSGGPPPKRSAPSGPVRSSSGMGGRAPVSRGRDSYGGPPRREPLPSRRDVYLSPRDDGYSTKDSYSSRDYPSSRDTRDYAPPPRDYTYRDYGHSSSRDDYPSRGYSDRDGYGRDRDYSDHPSGGSYRDSYESYGNSRSAPPTRGPPPSYGGSSRYDDYSSSRDGYGGSRDSYSSSRSDLYSSGRDRVGRQERGLPPSMERGYPPPRDSYSSSSRGAPRGGGRGGSRSDRGGGRSRY

SEQ ID NO: 6299 - DNA, 996 bp, Homo sapiens
ctcgtgattactcagtttgggaacagtgacaataactttacaaatacatatacagatgtatcttctgtccactcaggaaacacagcaagggtcccatttaactacaagtcagaggtgattccagggcactttggattcctcgtgccccaggatcaagcagtacttaccgcttccacggtacttagcgttcctgccaataaaagaagcccaactccggccgtcggctgtcgctgccagagggaggagggccatgatccaaaggaaccagagcagttgagaaaactgtttattggtggtctgagctttgaaactacagaagatagtttaaaagaacattttgagaaatgggacacactcacagattgtgtggtaatgagagaccgccaaacaaaacgttccaggggcttaggttttgtgacttattcttgtgttacagaggtagatgcagcaatgtgtgctcgaccacacaaggttgatgggcatgtagtggaaccaaaaagagctgtttctagagaggattctgtaaagcccggtgcccatctaacagtgaagaaaatttttgttggtggtattaaagaagatacagaagaatataatttgagagactactttgaaaagtatggcaagattgaaaccatagaagttatggaagacaggcagagtggaaaaaagagaggatttgcttttgtaacttttgatggtcacgatacagttgataaaattgttgttcagaaataccacactattaataggcataattgtgaagcaaaaaggccgtttctaaacaagaaatgcagtctgctggatcatagagaggtcgtggaggtgggtctggcaattttatgggttgcggaggaagctttggagatggtggagcaatcaaattatggacccatgaaagggggcagttttggtggaagacactcgggcagtccctatggtggtggttatggatctggtggtggaagtggtggatatggtagcagaaggttctaa

SEQ ID NO: 6300 - DNA, 1983 bp, Homo sapiens
tgggaatctgacggatcggaggcatttgtgaggaggcgcgaatcaagttagcggggggaagagtcttagacctggccagtcctcagggtgagggccctgaggaagaactgagggacctcccaccatagagagaagaaaccccggcctgtactgcgctgccgtgagactggtgctccaggaaccaggtggtgacgaactgggtgtgaggcacacagcctaaagtcagcacagcagaggaggcccaggcagtgccaggagtcaaggcctgttggatctcatcatccatatccctgttgatacgtttacctgctgctcctgaagaagtcgtcatgcctcccgttccaggcgttccattccgcaacgttgacaacgactccccgacctcagttgagttagaagactgggtagatgcacagcatcccacagatgaggaagaggaggaagcctcctccgcctcttccactttgtacttagtattttccccctcttctttctccacatcctcttctctgattcttggtggtcctgaggaggaggaggtgccctctggtgtgataccaaatcttaccgagagcattcccagtagtcctccacagggtcctccacagggtccttcccagagtcctctgagctcctgctgctcctctttttcatggagctcattcagtgaggagtccagcagccagaaaggggaggatacaggcacctgtcagggcctgccagacagtgagtcctctttcacatatacactagatgaaaaggtggccgagttagtggagttcctgctcctcaaatacgaagcagaggagcctgtaacagaggcagagatgctgatgattgtcatcaagtacaaagattactttcctgtgatactcaagagagcccgtgagttcatggagcttctttttggccttgccctgatagaagtgggccctgaccacttctgtgtgtttgcaaacacagtaggcctcaccgatgagggtagtgatgatgagggcatgcccgagaacagcctcctgattattattctgagtgtgatcttcataaagggcaactgtgcctctgaggaggtcatctgggaagtgctgaatgcagtaggggtatatgctgggagggagcacttcgtctatggggagcctagggagctcctcactaaagtttgggtgcagggacattacctggagtatcgggaggtgccccacagttctcctccatattatgaattcctgtggggtccaagagcccattcagaaagcatcaagaagaaagtactagagtttttagccaagctgaacaacactgttcctagttcctttccatcctggtacaaggatgctttgaaagatgtggaagagagagtccaggccacaattgataccgcagatgatgccactgtcatggccagtgaaagcctcagtgtcatgtccagcaacgtctccttttctgagtgaagtctaggatagtttcttccccttgtgtttgaacagggcagtttaggttctaggtagtggagggccaggtggggctcgaggaacgtagtgttctttgcatttctgtcccatatgggtgatgtagagatttacctgtttttcagtattttctaaatgcttttcctttgaatagcaggtagttagcttcagagtgttaatttatgaatattagtcgcacatgtattgctctttatctggtttaagagtaacagtttgatattttgttaaaaaaatggaaataccttctcccttattttgtgatctgtaacagggtagtgtggtattgtaataggcatttttttttttttttacaatgtgcaataactcagcagttaaatagtggaacaaaattgaagggtggtcagtagtttcatttccttgtcctgcttattcttttgttcttgaaaattatatatacctggctttgcttagcttgttgaagaaagtagcagaaattaaatcttaataaaagaaaaaaaaaaaaaaaaaaagg

SEQ ID NO: 6301 - protein, 373 aa, Homo sapiens
MPPVPGVPFRNVDNDSPTSVELEDWVDAQHPTDEEEEEASSASSTLYLVFSPSSFSTSSSLILGGPEEEEVPSGVIPNLTESIPSSPPQGPPQGPSQSPLSSCCSSFSWSSFSEESSSQKGEDTGTCQGLPDSESSFTYTLDEKVAELVEFLLLKYEAEEPVTEAEMLMIVIKYKDYFPVILKRAREFMELLFGLALIEVGPDHFCVFANTVGLTDEGSDDEGMPENSLLIIILSVIFIKGNCASEEVIWEVLNAVGVYAGREHFVYGEPRELLTKVWVQGHYLEYREVPHSSPPYYEFLWGPRAHSESIKKKVLEFLAKLNNTVPSSFPSWYKDALKDVEERVQATIDTADDATVMASESLSVMSSNVSFSE

SEQ ID NO: 6302 - DNA, 2407 bp, Homo sapiens
ttttctttgctgttcttcatcctcgttgttgctgtcatcatgttcactgtggcttttacaatacagcctgtaaattccttatgacatagttcagtgcatttggctttattgcctgctccacagttctttacctttacttggcttagagaaactgtatctttgttgcttcatataacctttccccaaccccactaagctggacataacttattagtggtcctcccgtcactttatttgtagaaatctctctttcacatgagcaggggttctttcatgtggtttagctgacagcagaactagtgattctagacattttgcatggccctcattcagtggctcacaaacatgagggagcatcagaactacttgaggggcttgttaaaacccagtgcgttagaagtcggatgcggtggctcacacctgtaatcccagcactttgggaggcccaggcaggcggatcacttgaggttaggagttcaagaccagcctggccaacatggtgaaaccccgtctctactaaaaatacaaaagttagccgggtgtggtggtgcatgcctgtaatcccagcttcttgggaggccaaggcacaagaatcgcttgaaccaggagacggaggtttcagtgaatgaagatcgtgccattgtattccagcctcggcaacacagcaggactgtgattttctttggagactcctagattttctgtggttttgaactgaatttgttggatgttggcaagtgcctcttatgagctgtttctttatcctgcatttgccccacaaagacttatctggaggtgagcaaagtatgtttggtagtgaggtcacaaaggcaatcagccccttcctccccactcccattgccatcttctcagtccttctccctttctttccaagtagtttacccacccctcctctttcctcccctgtccctaaaataatccacgtgtcttcctaaaatctctctttgatcctgtcctttgataacaccgtcagtgcctactactgggtctagacagacctctgttgagcagtcagagtcttccctgactccacaatgcccctttccttggctgaccagtatgactactggtccccacctttcccttgcctatccctacctccctcctactaggttgtcccatccctctcttcacccattcattcatgaccatttttcactaccaagctccccccctcccgaaggaggctgaggtttttgtgactctctagactctattgtgggatggaatgaacattgctaaagaatcttgtgttcgctttactttaaaaaggtatttttttcctaattataaaactgatgtgtcagttacggaaaaattagaaatgcagcacaaatacatgaatattttaccacaaaattgccatataatatcttgtcttttttgggggtgtgaattttttgcattgttctggtcatattctttatcatgtaatttatgttcttttttactaagtattatgtgtggttattatagattttcacaaagatatattgctggtaatatattttattgtgtagtcttataatttacttaaccttctttcaattgttagaaatttaggctatttccagattttcagtattgtaaataatgctgtgatgaccaattttgtgaataaaatgtttttatgtatttcagattattcccttaggatagtctctcagtgccaagttgtcaaaaacatctctattttgcttatcttcctgctctcttgctgccttagggggtagtaaactgaaacataaagtaaacatgcatacaaataaaaaacataaaacaaaaataagcaacctgatggtaataggtgaaagtggtaacctgttttaactttgaattcttgccgggcgcggtgctcacgcctgtaatcccagcactttgggaggctgaggcgggtggatcacgaggtcaggagttcaagaccagcctggccaagatggtgaaatcccgtctctactaaaaatacaaaaattagccgggcgtggtggtgggcgcctgtaatcccagctacttgggaggctgaggcagagaattgcttgaacccaggaggcggaggttgcagtgagccaagatcgtgccactgcactccagcctgggtgacagagcgagactccgtctcaaataaaaaacaacaaaaaacaaaaaaaacttaaaattctttgcttgttagtgaccttgatcatggttctctttgtacgatagttgggcatctgtatttccacttgtgtgaatttgcctttaaattttggttatgggtttcaccttttaaaataatcaaacatatttatcttttcctgtgtgataggtttttttctgtatcttttcctgttaaacacacagacccctccccaatctggacattgaataaatattcattttcctttgc

SEQ ID NO: 6303 - protein, 99 aa, Homo sapiens
MNIAKESCVRFTLKRYFFPNYKTDVSVTEKLEMQHKYMNILPQNCHIISCLFWGCEFFALFWSYSLSCNLCSFLLSIMCGYYRFSQRYIAGNIFYCVVL

SEQ ID NO: 6304 - DNA, 1860 bp, Homo sapiens
gggagctgtatgaaagcggaagagttatagaccgctaacacctgtcactggccactggtttcccggagttagcggcaacgaccttgcagcctggacactagccaggcgctccctcttctcacagcggcccacgtctccttgcttgggagcccatcgtcctggctccggtggcctcgctgggtctcggggaagcagaggactgttcattcctgtggcgaaaagccggagtcggccctagacacccacgactcgcagggtccatggttccggaggccgtgagacctgccggggctgacaggtgccagggcccatgctgcgggagcctgtgtgctcagccttcttgcggacggtaaagaagctaagtggaagagtgtttcctcctctggccgtaaagcaggtactctctgcagcaccagctgtccccgccctactccggaccgccccaaagactccatgggatggacctgagtcagccgaatcccagccccttcccttgggcctgctgtggtgctggacatcagtgacagacggaagcaggagaccatcaaggctacgggaggcccggggcgcttgcgaagatgaagtttggctgcctctccttccggcagccttatgctggctttgtcttaaatggaatcaagactgtggagacgcgctggcgtcccctgctgagcagccagcggaactgtaccatcgccgtccacattgctcacagggactgggaaggcgatgcctggcgggagctgctggtggagagactcgggatgactcctgctcagattcaggccttgctcaggaaaggggaaaagtttggtcgaggagtgatagcgggactcgttgacattggggaaactttgcaatgccccgaagacttaactcccgatgaggttgtggaactagaaaatcaagctgtactgaccaacctgaagcagaagtacctgactgtgatttcaaaccccaggtggttactggagcccatacctaggaaaggaggcaaggatgtattccaggtagacatcccagagcacctgatccctttggggcatgaagtgtgacaagtgtgggctcctgaaaggaatgttccagagaaaccagctaaatcatgacaccttcaatttgccatcatgacgcagacctgtatacattaggttaaatctgaatttccactgctttggagagtcccacccactaagcactgtgcatgtaaacaggttcctttgctcagatgaaggaagtagggggtggggctttccttgtgtgatgcctccttaggcacacaggcaatgtctcaagtactttgaccttagggtagaaggcaaagctgccagtaaatgtctcagcattgctgctaattttggtcctgctagtttctggattgtacaaataaatgtgttgtagatgactggttagtgtttgaggctttgttctatgttttcccctgatttgttctggtcaaaactcatcaaatgtgtaactagcatccaggcgacaatacagaaagtctgggacctggcactgaatgtttgcctggtagtgactagccgttaatcaaccgactcatccaggatgaagaggacgtcagacttagagcagctgtctgtcctttcaggttactctcactcttctgaaagtgtctgtcagtttctgaagcatgtgtgttacctgcatcacacagctacttcctatcctagcaatacatccaaaatacagctctagtagagtgaggttaacttggaaatgtgatcagtagtgttgttttattttgtagtaatttttttttttttttggtgatttagcaaagtttctagttgttatccatgaggatgatgggcatttccccccaggtattgactgcagtgg

SEQ ID NO: 6305 - protein, 158 aa, Homo sapiens
MKFGCLSFRQPYAGFVLNGIKTVETRWRPLLSSQRNCTIAVHIAHRDWEGDACRELLVERLGMTPAQIQALLRKGEKFGRGVIAGLVDIGETLQCPEDLTPDEVVELENQAALTNLKQKYLTVISNPRWLLEPIPRKGGKDVFQVDIPEHLIPLGHEV

SEQ ID NO: 6306 - DNA, 1209 bp, Homo sapiens
ggagctgcatgaaagccgaagttatggaccgctagcatctgtcactggccaccggtttccgggagtaagcggcagctaccttacagccctgacacgagccgggtgctctctcttctcaccgcggcccacgtctcctcgctggctccggtggcctcgctgggtcgcgaggaggcggaggactgtactctgaggccaaaagccagagtcggccctgaacgcccacgactctcagggtccagaggccgtgagaccggccgcggctgaaaggtaccagggcccctgatgccggagcccgtgtgctcggccctcttgcagacggtaaagaaaccaagtggaagagtgtttcctcctctggccgtaaagcagctgtccccgccctactccggaccgccccaaagactccatgggatggacctgagtcagacggaagcagcagaccatcaaggctacgggaggcccggggcgcttgcgaagatgaagtttggctgcctctccttccggcagccttatgctggctttgtcttaaatggaatcaagactgtggagacgcgctggcgtcctctgctgagcagccagcggaactgtaccatcgccgtccacattgctcacagggactgggaaggcgatgcctgtcgggagctgctggtggagagactcgggatgactcctgctcagattcaggccttgctcaggaaaggggaaaagtttggtcgaggagtgatagcgggactcgttgacattggggaaactttgcaatgccccgaagacttaactcccgatgaggttgtggaactagaaaatcaagctgcactgaccaacctgaagcagaagtacctgactgtgatttcaaaccccaggtggttactggagcccatacctaggaaaggaggcaaggatgtattccaggtagacatcccagagcacctgatccctttggggcatgaagtgtgacaagtgtgggctcctgaaaggaatgttccagagaaaccagctaaatcatggcaccttcaatttgccatcgtgacgcagacctgtataaattaggttaaagatgaatttccttgtgtgatgcctccttaggcacacaggcaatgtctcaagtactttgaccttagggtagaaggcaaagctgccagtaaatgtctcagcattgctgctaattttggtcctgctagtttctggattgtacaaataaatgtgttgtagatg

SEQ ID NO: 6307 - protein, 204 aa, Homo sapiens
MCVTDKTRPPSSSWFPMPAKYMTFLGPLTSFAVLHLMTFPLYLPCCAGKEAKWKSVSSSGRKAAVPALLRTAPKTPWDGPESAESQPLPLGLLWCWTSVTDGSRRPSRLREARGACEDEVWLPLLPAALCWLCLKWNQDCGDALASPAEQPAELYHRRPHCSQGLGRRCLAGAAGGETRDDSCSDSGLAQERGKVWSRSDSGTR

SEQ ID NO: 6308 - DNA, 1843 bp, Homo sapiens
ggcacgagggcggggatcagagagaagcgagggcctggttctgaggggtcggcttgagatcggctgagggaagcgggctcagggtctgtgaggaggcaaggttcgcagagaacaggccagccaggaggtcaggaggccccagagaagcactgaagaagacctgcctgtgggtctcaattgcccagctccggcccacactctcctgctgccctgacctgagtcatcatgcttcttgggcagaagagtcagcgctacaaggctgaggaaggccttcaggcccaaggagaggcaccagggcttatggatgtgcagattcccacagctgaggagcagaaggctgcatcctcctcctctactctgatcatgggaacccttgaggaggtgactgattctgggtcaccaagtcctccccagagtcctgagggtgcctcctcttccctgactgtcaccgacagcactctgtggagccaatccgatgagggttccagcagcaatgaagaggaggggccaagcacctccccggacccagctcacctggagtccctgttccgggaagcacttgatgagaaagtggctgagttagttcgtttcctgctccgcaaatatcaaattaaggagccggtcacaaaggcagaaatgcttgagagtgtcatcaaaaattacaagaaccactttcctgatatcttcagcaaagcctctgagtgcatgcaggtgatctttggcattgatgtgaaggaagtggaccctgccggccactcctacatccttgtcacctgcctgggcctctcctatgatggcctgctgggtgatgatcagagtacgcccaagaccggcctcctgataatcgtcctgggcatgatcttaatggagggcagccgcgccccggaggaggcaatctgggaagcgttgagtgtgatggggctgtatgatgggagggagcacagtgtctattggaagctcaggaagctgctcacccaagagtgggtgcaggagaactacctggagtaccgccaggcgcccggcagtgatcctgtgcgctacgagttcctgtggggtccaagggcccttgctgaaaccagctatgtgaaagtcctggagcatgtggtcagggtcaatgcaagagttcgcatttcctacccatccctgcatgaagaggctttgggagaggagaaaggagtttgagcaggagttgcagctagggccagtggggcaggttgtgggagggcctgggccagtgcacgttccagggccacatccaccactttccctgctctgttacatgaggcccattcttcactctgtgtttgaagagagcagtcacagttctcagtagtggggagcatgttgggtgtgagggaacacagtgtggaccatctctcagttcctgttctattgggcgatttggaggtttatctttgtttccttttggaattgttccaatgttccttctaatggatggtgtaatgaacttcaacattcattttatgtatgacagtagacagacttactgctttttatatagtttaggagtaagagtcttgcttttcatttatactgggaaacccatgttatttcttgaattcagacactacaagagcagaggattaaggtttttttagaaatgtgaaacaacatagcagtaaaatacatgagataaagacataaagaaattaaacaatagttaattcttgccttacctgtacctcttagtgtaccctatgtacctgaatttgcttggcttctttgagaatgaaattgaattaaatatgaataaataagtccccctgaaaaaaaaaaaaaaaaaaaaaaaaaaaaaaaaaaaaaaaaaaaaaaaaaaaaaaaa

SEQ ID NO: 6309 - protein, 318 aa, Homo sapiens
MLLGQKSQRYKAEEGLQAQGEAPGLMDVQIPTAEEQKAASSSSTLIMGTLEEVTDSGSPSPPQSPEGASSSLTVTDSTLWSQSDEGSSSNEEEGPSTSPDPAHLESLFREALDEKVAELVRFLLRKYQIKEPVTKAEMLESVIKNYKNHFPDIFSKASECMQVIFGIDVKEVDPAGHSYILVTCLGLSYDGLLGDDQSTPKTGLLIIVLGMILMEGSRAPEEAIWEALSVMGLYDGREHSVYWKLRKLLTQEWVQENYLEYRQAPGSDPVRYEFLWGPRALAETSYVKVLEHVVRVNARVRISYPSLHEEALGEEKGV

SEQ ID NO: 6310 - DNA, 3367 bp, Homo sapiens
agtttccaggatggcttctgcatcaacttcttaaaataattcacactccttggagaatgagtctattaagaggacgtctcgagatggagtcaatcgagatctcactgaggctgttcctcgacttccaggagaaacactaatcactgacaaagaagttatttacatatgtcctttcaatggccccattaagggaagagtttacatcacaaattatcgtctttatttaagaagtttggaaacggattcttctctaatacttgatgttcctctgggtgtgatctcgagaattgaaaaaatgggaggcgcgacaagtagaggagaaaattcctatggtctaaatattacttgtaaagacatgagaaacctgaggttcgctttgaaacaggaaggccacagcagaagagatatgtttgagatcctcacgagatacgcgtttcccctggctcacagtctgccattatttgcatttttaaatgaagaaaagtttaacgtggatggatggacagtttacaatccagtggaagaatacaggaggcagggcttgcccaatcaccattggagaataacttttattaataagtgctatgagctctgtgacacttaccctgctcttttggtgattccgtatcgtgcctcagatgatgacctcaggaagttgcaacttttaggtcccgaaatcgaattccagtgctgtcatggattcatccagaaaataagacggtcattgtgcgttgcagtcagcctcttgtcggtatgagtgggaaacgaaataaagatgatgagaaatatctcgatgttatcagggagactaataaacaaatttctaaactcaccatttatgatgcaagacccagcgtaaatgcagtggccaacaaggcaacaggaggaggatatgaaagtgatgatgcatatcataacgccgaacttttcttcttagacattcataatattcatgttatgcgggaatctttaaaaaaagtgaaggacattgtttatcctaatgtagaagaatctcattggttgtccagtttggagtctactcattggttagaacatatcaagctcgttttgacaggagccattcaagtagcagacaaagtttcttcagggaagagttcagtgcttgtgcattgcagtgacggatgggacaggactgctcagctgacatccttggccatgctgatgttggatagcttctataggagcattgaagggttcgaaatactggtacaaaaagaatggataagttttggacataaatttgcatctcgaataggtcatggtgataaaaaccacaccgatgctgaccgttctcctatttttctccagtttattgattgtgtgtggcaaatgtcaaaacagttccctacagcttttgaattcaatgaacaatttttgattataattttggatcatctgtatagttgccgatttggtactttcttattcaactgtgaatctgctcgagaaagacagaaggttacagaaaggactgtttctttatggtcactgataaacagtaataaagaaaaattcaaaaaccccttctatactaaagaaatcaatcgagttttatatccagttgccagtatgcgtcacttggaactctgggtgaattactacattagatggaaccccaggatcaagcaacaacagccgaatccagtggagcagcgttacatggagctcttagccttacgcgacgaatacataaagcggcttgaggaactgcagctcgccaactctgccaagctttctgatcccccaacttcaccttccagtccttcgcaaatgatgccccatgtgcaaactcacttctgaggggggaccctggcaccgcattagagctcgaaataaaggcgatagctgactttcatttggggcatttgtaaaaagtagattaaaatatttgcctccatgtagaacttgaactaacataatcttaaactcttgaatatgtgccttctagaatacatattacaagaaaactacagggtccacacggcaatcagaagaaaggagctgagatgaggttttggaaaaccctgacacctttaaaaagcagtttttgaaagacaaaatttagatttaatttacgtcttgagaaatactatatatacaatatatattttgtgggcttaattgaaacaacattattttaaaatcaaaggggatatatgtttgtggaatggattttcctgaagctgcttaacagttgctttggattctctaagatgaatccaaatgtgaaagatgcatgttactgccaaaaccaaattgagctcagcttcctaggcattacccaaaagcaaggtgtttaagtaattgccagcttttataccatcatgagtggtgacttaaggagaaatagctgtatagatgagtttttcattatttggaaatttaggggtagaaaatgttttcccctaattttccagagaagcctatttttatatttttaaaaaactgacagggcccagttaaatatgatttgcattttttaaatttgccagttttattttctaaattctttcatgagcttgcctaaaattcggaatggttttcgggttgtggcaaaccccaaagagagcactgtccaaggatgtcgggagcatcctgctgcttaggggaatgttttcgcaaatgttgctctagtcagtccagctcatctgccaaaatgtagggctaccgtcttggatgcatgagctattgctagagcatcatccttagaaatcagtgccccagatgtacatgtgttgagcgtattcttgaaagtattgtgtttatgcatttcaatttcaatggtgttggcttcccctccccaccccacgcgtgcataaaaactggttctacaaatttttacttgaagtaccaggccgtttgctttttcaggttgttttgttttatagtattaagtgaaattttaaatgcacagttctatttgctatctgaactaattcatttattaagtatatttgtaaaagctaaggctcgagttaaaacaatgaagtgttttacaatgatttgtaaaggactatttataactaatatggttttgttttcaatgaattaagaaagattaaatatatctttgtaaattattttatgtcatagtttaattggtctaccaagtaagacatctcaaatacagtagtataatgtatgaattttgtaagtataagaaattttattagacattctcttactttttgtaaatgctgtaaatatttcataaattaacaaagtgtcactccataaaaagaaagctaatactaatagcctaaaagattttgtgaaatttcatgaaaactttttaatggcaataatgactaaagacctgctgtaataaatgtattaactgaaacct

SEQ ID NO: 6311 - DNA, 1723 bp, Homo sapiens
gagattctcgccctgagcaacgagcgacggcctgacgtcggcggagggaagccggcccaggctcggtgaggaggcaaggttctgaggggacaggctgacctggaggaccagaggcccccggaggagcactgaaggagaagatctgccagtgggtctccattgcccagctcctgcccacactcccgcctgttgccctgaccagagtcatcatgcctcttgagcagaggagtcagcactgcaagcctgaagaaggccttgaggcccgaggagaggccctgggcctggtgggtgcgcaggctcctgctactgaggagcaggaggctgcctcctcctcttctactctagttgaagtcaccctgggggaggtgcctgctgccgagtcaccagatcctccccagagtcctcagggagcctccagcctccccactaccatgaactaccctctctggagccaatcctatgaggactccagcaaccaagaagaggaggggccaagcaccttccctgacctggagtctgagttccaagcagcactcagtaggaaggtggccaagttggttcattttctgctcctcaagtatcgagccagggagccggtcacaaaggcagaaatgctggggagtgtcgtcggaaattggcagtacttctttcctgtgatcttcagcaaagcttccgattccttgcagctggtctttggcatcgagctgatggaagtggaccccatcggccacgtgtacatctttgccacctgcctgggcctctcctacgatggcctgctgggtgacaatcagatcatgcccaagacaggcttcctgataatcatcctggccataatcgcaaaagagggcgactgtgcccctgaggagaaaatctgggaggagctgagtgtgttagaggtgtttgaggggagggaagacagtatcttcggggatcccaagaagctgctcacccaatatttcgtgcaggaaaactacctggagtaccggcaggtccccggcagtgatcctgcatgctatgagttcctgtggggtccaagggccctcattgaaaccagctatgtgaaagtcctgcaccatatggtaaagatcagtggaggacctcgcatttcctacccactcctgcatgagtgggctttgagagagggggaagagtgagtctgagcacgagttgcagccagggccagtgggagggggtttgggccagtgcaccttccggggccccatcccttagtttccactgcctcctgtgacgtgaggcccattcttcactctttgaagcgagcagtcagcattcttagtagtgggtttctgttctgttggatgactttgagattattctttgtttcctgttggagttgttcaaatgttccttttaacggatggttgaatgagcgtcagcatccaggtttatgaatgacagtagtcacacatagtgctgtttatatagtttaggagtaagagtcttgttttttattcagattgggaaatccattccattttgtgaattgtgacataataatagcagtggaaaaagtatttgcttaaaattgtgagcgaattagcaataacatacatgagataactcaagaaatcaaaagatagttgattcttgccttgtacctcaatctattctgtaaaattaaacaaatatgcaaaccaggatttccttgacttctttgagaatgcaagcgaaattaaatctgaataaataattcttcctcttc

SEQ ID NO: 6312 - protein, 314 aa, Homo sapiens
MPLEQRSQHCKPEEGLEARGEALGLVGAQAPATEEQEAASSSSTLVEVTLGEVPAAESPDPPQSPQGASSLPTTMNYPLWSQSYEDSSNQEEEGPSTFPDLESEFQAALSRKVAKLVHFLLLKYRAREPVTKAEMLGSVVGNWQYFFPVIFSKASDSLQLVFGIELMEVDPIGHVYIFATCLGLSYDGLLGDNQIMPKTGFLIIILAIIAKEGDCAPEEKIWEELSVLEVFEGREDSIFGDPKKLLTQYFVQENYLEYRQVPGSDPACYEFLWGPRALIETSYVKVLHHMVKISGGPRISYPLLHEWALREGEE

SEQ ID NO: 6313 - DNA, 1670 bp, Homo sapiens
cggcctgacgtcggcggagggaagcaggcgcaggctccgtgaggaggcaaggttctgagggggacaggctgacaagtaggacccgaggcactggaggagcattgaaggagaagatctgcctgtgggtcttcattgcccagctcctgcccgcactcctgcctgctgccctgaccagagtcatcatgcctcttgagcagaggagtcagcactgcaagcctgaagaaggccttgaggcccgaggagaggccctgggcctggtgggtgcgcaggctcctgctactgaggagcagcagaccgcttcttcctcttctactctagtggaagttaccctgggggaggtgcctgctgccgactcaccgagtcctccccacagtcctcagggagcctccagcttctcgactaccatcaactacactctttggagacaatccgatgagggctccagcaaccaagaagaggaggggccaagaatgtttcccgacctggagtccgagttccaagcagcaatcagtaggaagatggttgagttggttcattttctgctcctcaagtatcgagccagggagccggtcacaaaggcagaaatgctggagagtgtcctcagaaattgccaggacttctttcccgtgatcttcagcaaagcctccgagtacttgcagctggtctttggcatcgaggtggtggaagtggtccccatcagccacttgtacatccttgtcacctgcctgggcctctcctacgatggcctgctgggcgacaatcaggtcatgcccaagacaggcctcctgataatcgtcctggccataatcgcaatagagggcgactgtgcccctgaggagaaaatctgggaggagctgagtatgttggaggtgtttgaggggagggaggacagtgtcttcgcacatcccaggaagctgctcatgcaagatctggtgcaggaaaactacctggagtaccggcaggtgcccggcagtgatcctgcatgctacgagttcctgtggggtccaagggccctcattgaaaccagctatgtgaaagtcctgcaccatacactaaagatcggtggagaacctcacatttcctacccacccctgcatgaacgggctttgagagagggagaagagtgagtctcagcacatgttgcagccagggccagtgggagggggtctgggccagtgcaccttccagggccccatccattagcttccactgcctcgtgtgatatgaggcccattcctgcctctttgaagagagcagtcagcattcttagcagtgagtttctgttctgttggatgactttgagatttatctttgtttcctgttggaattgttcaaatgttccttttaacaaatggttggatgaacttcagcatccaagtttatgaatgacagtagtcacacatagtgctgtttatatagtttaggggtaagagtcctgttttttattcagattgggaaatccattccattttgtgagttgtcacataataacagcagtggaatatgtatttgcctatattgtgaacgaattagcagtaaaatacatgatacaaggaactcaaaagatagttaattcttgccttatacctcagtctattatgtaaaattaaaaatatgtgtatgtttttgcttctttgagaatgcaaaagaaattaaatctgaataaataa

SEQ ID NO: 6314 - protein, 314 aa, Homo sapiens
MPLEQRSQHCKPEEGLEARGEALGLVGAQAPATEEQQTASSSSTLVEVTLGEVPAADSPSPPHSPQGASSFSTTINYTLWRQSDEGSSNQEEEGPRMFPDLESEFQAAISRKMVELVHFLLLKYRAREPVTKAEMLESVLRNCQDFFPVIFSKASEYLQLVFGIEVVEVVPISHLYILVTCLGLSYDGLLGDNQVMPKTGLLIIVLAIIAIEGDCAPEEKIWEELSMLEVFEGREDSVFAHPRKLLMQDLVQENYLEYRQVPGSDPACYEFLWGPRALIETSYVKVLHHTLKIGGEPHISYPPLHERALREGEE

SEQ ID NO: 6315 - DNA, 1670 bp, Homo sapiens; identical to SEQ ID NO: 6313

SEQ ID NO: 6316 - DNA, 1753 bp, Homo sapiens
gagattctcgccctgagcaacgagcgacggcctgacgtcggcggagggaagccggcccaggctcggtgaggaggcaaggttctgaggggacaggctgacctggaggaccagaggcccccggaggagcactgaaggagaagatctgccagtgggtctccattgcccagctcctgcccacactcccgcctgttgccctgaccagagtcatcatgcctcttgagcagaggagtcagcactgcaagcctgaagaaggccttgaggcccgaggagaggccctgggcctggtgggtgcgcaggctcctgctactgaggagcaggaggctgcctcctcctcttctactctagttgaagtcaccctgggggaggtgcctgctgccgagtcaccagatcctccccagagtcctcagggagcctccagcctccccactaccatgaactaccctctctggagccaatcctatgaggactccagcaaccaagaagaggaggggccaagcaccttccctgacctggagtccgagttccaagcagcactcagtaggaaggtggccgagttggttcattttctgctcctcaagtatcgagccagggagccggtcacaaaggcagaaatgctggggagtgtcgtcggaaattggcagtatttctttcctgtgatcttcagcaaagcttccagttccttgcagctggtctttggcatcgagctgatggaagtggaccccatcggccacttgtacatctttgccacctgcctgggcctctcctacgatggcctgctgggtgacaatcagatcatgcccaaggcaggcctcctgataatcgtcctggccataatcgcaagagagggcgactgtgcccctgaggagaaaatctgggaggagctgagtgtgttagaggtgtttgaggggagggaagacagtatcttgggggatcccaagaagctgctcacccaacatttcgtgcaggaaaactacctggagtaccggcaggtccccggcagtgatcctgcatgttatgaattcctgtggggtccaagggccctcgttgaaaccagctatgtgaaagtcctgcaccatatggtaaagatcagtggaggacctcacatttcctacccacccctgcatgagtgggttttgagagagggggaagagtgagtctgagcacgagttgcagccagggccagtgggagggggtctgggccagtgcaccttccggggccgcatcccttagtttccactgcctcctgtgacgtgaggcccattcttcactctttgaagcgagcagtcagcattcttagtagtgggtttctgttctgttggatgactttgagattattctttgtttcctgttggagttgttcaaatgttccttttaacggatggttgaatgagcgtcagcatccaggtttatgaatgacagtagtcacacatagtgctgtttatatagtttaggagtaagagtcttgttttttactcaaattgggaaatccattccattttgtgaattgtgacataataatagcagtggtaaaagtatttgcttaaaattgtgagcgaattagcaataacatacatgagataactcaagaaatcaaaagatagttgattcttgccttgtacctcaatctattctgtaaaattaaacaaatatgcaaaccaggatttccttgacttctttgagaatgcaagcgaaattaaatctgaataaataattcttcctctccaaaaaaaaaaaaaaaaaaaaaaaaaaaaaa

SEQ ID NO: 6317 - protein, 314 aa, Homo sapiens
MPLEQRSQHCKPEEGLEARGEALGLVGAQAPATEEQEAASSSSTLVEVTLGEVPAAESPDPPQSPQGASSLPTTMNYPLWSQSYEDSSNQEEEGPSTFPDLESEFQAALSRKVAELVHFLLLKYRAREPVTKAEMLGSVVGNWQYFFPVIFSKASSSLQLVFGIELMEVDPIGHLYIFATCLGLSYDGLLGDNQIMPKAGLLIIVLAIIAREGDCAPEEKIWEELSVLEVFEGREDSILGDPKKLLTQHFVQENYLEYRQVPGSDPACYEFLWGPRALVETSYVKVLHHMVKISGGPHISYPPLHEWVLREGEE

SEQ ID NO: 6318 - DNA, 2465 bp, Homo sapiens
gagcagcgcggcctgacgggaccaaggcggcgggagtctgcggtcgttccctcggctgtggaccgggcggcacgcacgcggtgcagggtaacatggcggatgcggaagtaattattttgccaaagaaacataagaagaaaaaggagcggaagtcattgccagaagaagatgtagccgaaatacaacacgctgaagaatttcttatcaaacctgaatccaaagttgctaagttggacacgtctcagtggccccttttgctaaagaattttgataagctgaatgtaaggacaacacactatacacctcttgcatgtggttcaaatcctctgaagagagagattggggactatatcaggacaggtttcattaatcttgacaagccctctaacccctcttcccatgaggtggtagcctggattcgacggatacttcgggtggagaagacagggcacagtggtactctggatcccaaggtgactggttgtttaatcgtgtgcatagaacgagccactcgcttggtgaagtcacaacagagtgcaggcaaagagtatgtggggattgtccggctgcacaatgctattgaaggggggacccagctttctagggccctagaaactctgacaggtgccttattccagcgacccccacttattgctgcagtaaagaggcagctccgagtgaggaccatctacgagagcaaaatgattgaatacgatcctgaaagaagattaggaatcttttgggtgagttgtgaggctggcacctacattcggacattatgtgtgcaccttggtttgttattgggagttggtggtcagatgcaggagcttcggagggttcgttctggagtcatgagtgaaaaggaccacatggtgacaatgcatgatgtgcttgatgctcagtggctgtatgataaccacaaggatgagagttacctgcggcgagttgtttaccctttggaaaagctgttgacatctcataaacggctggttatgaaagacagtgcagtaaatgccatctgctatggggccaagattatgcttccaggtgttcttcgatatgaggacggcattgaggtcaatcaggagattgtggttatcaccaccaaaggagaagcaatctgcatggctattgcattaatgaccacagcggtcatctctacctgcgaccatggtatagtagccaagatcaagagagtgatcatggagagagacacttaccctcggaagtggggtttaggtccaaaggcaagtcagaagaagctgatgatcaagcagggccttctggacaagcatgggaagcccacagacagcacacctgccacctggaagcaggagtatgttgactacagtgagtctgccaaaaaagaggtggttgctgaagtggtaaaagccccgcaggtagttgccgaagcagcaaaaactgcgaagcggaagcgagagagtgagagtgaaagtgacgagactcctccagcagctcctcagttgatcaagaaggaaaagaagaagagtaagaaggacaagaaggccaaagctggtctggagagcggggccgagcctggagatggggacagtgataccaccaagaagaagaagaagaagaagaaagcaaaagaggtagaattggtttctgagtagtgaaggccacttgaagctggaggagaaactaaagccttattgagaaaacatgttatagatccttttgttgctgagagagtggaacataggtcctagacagggtgaagagttctggcacattttagctgctactttgagacctcggtgatgttacctggtgtggtcatcccatcttgtcctgttttaaggatatgggtggtgaaagatgaaagaggcagagtttatcccaatgacttctctgtttgagttgggaagcctcaccttcagacccagtaactgtccgcagctgtctgctagtggttgtcttaacatcgtagtcctagtttgcattttttaaatcccctctgtttaaaaggtttgtaaaacaaaaacaaaaaactaagtctgctcagtgaaatgctgtagaaccctaaataagtggtagaagagtgtcactgaattttgtctctgaattcagtataactgagttttgtccatgctggtgtctgggttataggcctgatgggcctggtagttttccatcttgttctggcctagaggtcagtcctttgcacttcctcaaagcttgtgtacagtgctcacctaaatccatctgactacttgttcctgtgccctcttgttttaggcctcgtttacttttaaaaaatgaaattgttcattgctgggagaagaatgttgtaatttttacttattaaagtcaacttgttaagttttttatgtattcctgttgggttttcttgttgatctcatgctagcagagcaaaaattgtaaaatattttgattaaaaatctagggacctttatgtcctatttggaattcgatatcaa

SEQ ID NO: 6319 - protein, 514 aa, Homo sapiens
MADAEVIILPKKHKKKKERKSLPEEDVAEIQHAEEFLIKPESKVAKLDTSQWPLLLKNFDKLNVRTTHYTPLACGSNPLKREIGDYIRTGFINLDKPSNPSSHEVVAWIRRILRVEKTGHSGTLDPKVTGCLIVCIERATRLVKSQQSAGKEYVGIVRLHNAIEGGTQLSRALETLTGALFQRPPLIAAVKRQLRVRTIYESKMIEYDPERRLGIFWVSCEAGTYIRTLCVHLGLLLGVGGQMQELRRVRSGVMSEKDHMVTMHDVLDAQWLYDNHKDESYLRRVVYPLEKLLTSHKRLVMKDSAVNAICYGAKIMLPGVLRYEDGIEVNQEIVVITTKGEAICMAIALMTTAVISTCDHGIVAKIKRVIMERDTYPRKWGLGPKASQKKLMIKQGLLDKHGKPTDSTPATWKQEYVDYSESAKKEVVAEVVKAPQVVAEAAKTAKRKRESESESDETPPAAPQLIKKEKKKSKKDKKAKAGLESGAEPGDGDSDTTKKKKKKKKAKEVELVSE

SEQ ID NO: 6320 - DNA, 2631 bp, Homo sapiens
agggacagcccagaggaggcgtggccacgctgccggcggaagtggagccctccgcgagcgcgcgaggccgccggggcaggcggggaaaccggacagtaggggcggggccgggccggcgatggggatgcgggagcactacgcggagctgcacccgtgcccgccggaattggggatgcagagcagcggcagcgggtatggcaggcagccggcgggccggcctccagcgcaggtgcccgagaggcaggggctggcctgggatgcgcgcgcacctgccctcgccccgccccgcccgcacgaggggtggtggccgaggccccgccccgcacgcctcgcctgaggcgggtccgctcagcccaggcgcccgcccccgcccccgccgattaaatgggccggcggggctcagcccccggaaacggtcgtacacttcggggctgcgagcgcggagggcgacgacgacgaagcgcagacagcgtcatggcagagcaggtggccctgagccggacccaggtgtgcgggatcctgcgggaagagcttttccagggcgatgccttccatcagtcggatacacacatattcatcatcatgggtgcatcgggtgacctggccaagaagaagatctaccccaccatctggtggctgttccgggatggccttctgcccgaaaacaccttcatcatgggctatgcccgttcccgcctcacagtggctgacatccgcaaacagagtgagcccttcttcaaggccaccccagaggagaagctcaagctggaggacttctttgcccgcaactcctatgtggctggccagtacgatgatgcagcctcctaccagcgcctcaacagccacatggatgccctccacctggggtcacaggccaaccgcctcttctacctggccttgcccccgaccgtctacgaggccgtcaccaagaacattcacgagtcctgcatgagccagataggctggaaccgcatcatcgtggagaagcccttcgggagggacctgcagagctctgaccggctgtccaaccacatctcctccctgttccgtgaggaccagatctaccgcatcgaccactacctgggcaaggagatggtgcagaacctcatggtgctgagatttgccaacaggatcttcggccccatctggaaccgggacaacatcgcctgcgttatcctcaccttcaaggagccctttggcactgagggtcgcgggggctatttcgatgaatttgggatcatccgggacgtgatgcagaaccacctactgcagatgctgtgtctggtggccatggagaagcccgcctccaccaactcagatgacgtccgtgatgagaaggtcaaggtgttgaaatgcatctcagaggtgcaggccaacaatgtggtcctgggccagtacgtggggaaccccgatggagagggcgaggccaccaaagggtacctggacgaccccacggtgccccgcgggtccaccaccgccacttttgcagccgtcgtcctctatgtggagaatgagaggtgggatggggtgcccttcatcctgcgctgcggcaaggccctgaacgagcgcaaggccgaggtgaggctgcagttccatgatgtggccggcgacatcttccaccagcagtgcaagcgcaacgagctggtgatccgcgtgcagcccaacgaggccgtgtacaccaagatgatgaccaagaagccgggcatgttcttcaaccccgaggagtcggagctggacctgacctacggcaacagatacaagaacgtgaagctccctgacgcctacgagcgcctcatcctggacgtcttctgcgggagccagatgcacttcgtgcgcagcgacgagctccgtgaggcctggcgtattttcaccccactgctgcaccagattgagctggagaagcccaagcccatcccctatatttatggcagccgaggccccacggaggcagacgagctgatgaagagagtgggtttccagtatgagggcacctacaagtgggtgaacccccacaagctctgagccctgggcacccacctccacccccgccacggccaccctccttcccgccgcccgaccccgagtcgggaggactccgggaccattgacctcagctgcacattcctggccccgggctctggccaccctggcccgcccctcgctgctgctactacccgagcccagctacattcctcagctgccaagcactcgagaccatcctggcccctccagaccctgcctgagcccaggagctgagtcacctcctccactcactccagcccaacagaaggaaggaggagggcgcccattcgtctgtcccagagcttattggccactgggtctcactcctgagtggggccagggtgggagggagggacaagggggaggaaaggggcgagcacccacgtgagagaatctgcctgtggccttgcccgccagcctcagtgccacttgacattccttgtcaccagcaacatctcgagccccctggatgtcccctgtcccaccaactctgcactccatggccaccccgtgccacccgtaggcagcctctctgctataagaaaagcagacgcagcagctgggacccctcccaacctcaatgccctgccattaaatccgcaaacagcc

SEQ ID NO: 6321 - DNA, 2123 bp, Homo sapiens
gagctcgcgggcgactgcctgccaggcagacgctgcagctaagctgcgcggtggctgtggcaggtgagagcctccggaagggaggcggcctctggccccgaccctgctccgcgatcgcccactcgggcgcccggccgggcctggcagggaagggccgccgccgccgccgcgcgtttgcgaggcctggcggggccgcggggcccaggaatggcgtaaggggcccccccagactccgagacggcccgagcgggtcgccggctgtgggacggcggcgtgcccttcctttcctccctcccaggttcgcgcccgagctctgctagccacccgtccgacaacttccggactcccagggacagccctgccatcaaggaagacagcacaggactgggacccacccatgaacccttctcaggacaacccaacagcaccagtggggatgttctcctaagccgcagagggcctgggcacgccatccgtcctccaggaagagccatggtgttaatgcaggacaagggcagctctcagcagtggcctggtctggggggcgagggtggtggcacaggtcccttaagcatgctcagagctgccctgctgctcatcagcctgccatggggggcccaagggacagccagcaccagcctcagcactgctgggggtcacaccgtgccaccgactgggggccgctacttgagcattggagatggctctgtgatggagtttgagtttcctgaggacagtgagggcatcatcgtgatctccagccagtacccaggccaggccaacaggacggcgcctggccccatgctcagggtcacctccctggacacagaggtgctgaccatcaagaacgtgagtgctataacctggggaggcgggggtggctttgtggtgagcatccactcaggcctggctgggctggccccactccacatccagctcgtggacgcccatgaggccccgcccacactgattgaggagcggagagacttctgcatcaaggtctcacctgctgaagacacgcctgccaccctcagcgccgacctggcccacttctcggaaaacccaatcctctacctgctcctgcctcttatctttgtcaacaagtgttcgtttgggtgcaaagtggaactcgaggttctgaaggggctcatgcagagcccccagcccatgctgctgggcctcctgggccagtttctggtcatgcccttgtacgctttcctcatggccaaggtcttcatgctgcccaaggccctggctctgggcctcatcatcacctgctcgtcgcctggcggcggggggagctacctcttcagcctccttcttggaggggacgtcaccctggccatctccatgactttcctctctacggtggctgccactggcttcttgcctctgtcttcggccatctacagccgcctgctcagcatccatgagacgctccacgtgcccatctccaagatcctggggaccctgctgttcattgccatccccatagccgtgggcgtgctgatcaagtccaagctccccaagttctcccagctgctgctgcaggtcgtcaagcccttcagctttgtgctcctcctgggcggcctcttcctggcctatcgcatgggggtcttcatcctggcaggcatccggctacccatcgtactggtgggtatcacggtgcccctggttggcctgttggtgggctactgcctagccacgtgtctgaagctgccagtggcccagcggcggacggtcagcattgaggtaggggtgcagaacagcctgctggccttggccatgctgcagctatccctccgccgccttcaagctgactatgcctcccaggcccccttcattgtggcgctgagcggcacctccgagatgctggccttggtcattggccacttcatctacagcagcctgttcccagttccctgaggcctctgggtcaagctttcatcagccccagcccccacactccaccaaagttctcatgcactatgcactcagaaaaatccaggcttatttttttactgattttttattctccagctttcagtgccaaagaggccatgctgagttaggtaggtgggcgctgcccagaaaatatatttcaataaaagagagaagcaagc

SEQ ID NO: 6322 - protein, 477 aa, Homo sapiens
MVLMQDKGSSQQWPGLGGEGGGTGPLSMLRAALLLISLPWGAQGTASTSLSTAGGHTVPPTGGRYLSIGDGSVMEFEFPEDSEGIIVISSQYPGQANRTAPGPMLRVTSLDTEVLTIKNVSAITWGGGGGFVVSIHSGLAGLAPLHIQLVDAHEAPPTLIEERRDFCIKVSPAEDTPATLSADLAHFSENPILYLLLPLIFVNKCSFGCKVELEVLKGLMQSPQPMLLGLLGQFLVMPLYAFLMAKVFMLPKALALGLIITCSSPGGGGSYLFSLLLGGDVTLAISMTFLSTVAATGFLPLSSAIYSRLLSIHETLHVPISKILGTLLFIAIPIAVGVLIKSKLPKFSQLLLQVVKPFSFVLLLGGLFLAYRMGVFILAGIRLPIVLVGITVPLVGLLVGYCLATCLKLPVAQRRTVSIEVGVQNSLLALAMLQLSLRRLQADYASQAPFIVALSGTSEMLALVIGHFIYSSLFPVP

SEQ ID NO: 6323 - DNA, 1311 bp, Homo sapiens
ccgccgctgccgctgccgctgtcgctgtcgccgccgccgccgcccgccgccgccgccgccgccgccgccgctgccatggctcaatacaagggcgccgcgagcgaggccggccgcgccatgcacctgatgaagaagcgggagaagcagcgcgagcagatggagcagatgaagcagcgcatcgcggaggagaacatcatgaaatccaacattgacaagaagttctctgcgcactacgacgcggtggaggcagagctcaagtccagcaccgtgggtctcgtgaccctgaatgacatgaaggccaagcaggaggctctggtgaaggagcgggagaagcagctggccaagaaggagcagtccaaggagctgcagatgaagctggagaagcttcgagagaaggagcgtaagaaggaagccaagcggaagatctccagcctgtccttcaccctggaggaggaagaagagggaggcgaggaggaagaggaggcggccatgtatgaggaggagatggaaagggaagagatcaccacgaagaagagaaaactggggaagaacccagacgttgacacaagcttcttgcctgatcgagaccgtgaggaggaggagaatcggcttcgggaagagctgcggcaggagtgggaagccaagcaggagaagatcaagagtgaggagatcgagatcaccttcagctactgggatggctctgggcaccggcggacagtcaagatgagaaagggcaacaccatgcagcagttcctgcagaaggcgctcgagatccttcggaaagacttcagtgagctgaggtccgcaggggtggagcagctcatgtacatcaaggaggacttgatcatccctcaccatcacagcttctacgacttcatcgtcaccaaggcacgggggaagagtggaccactcttcaactttgatgttcatgacgatgtgcggttgctcagtgacgccactgtggagaaggatgagtcccatgcaggcaaggtggtgctgaggagctggtacgagaagaacaagcacatctttcccgccagccgctgggaaccctacgaccctgaaaagaagtgggacaagtacacgatccgctgagcatccaggaggctgcgcggccccggctcctcagctccctcagtgtgccccgtggtgtcaccgggactccaggcacccgctcccctgcgaccatgccaggcacgctgggaggaggacggcagctgctcgtgtcctgcccctgccacatcagtgactgctttattcttttccaataaagaagtgcacgtgtcagagctggagcgcctgcattgtgag

SEQ ID NO: 6324 - protein, 339 aa, Homo sapiens
MAQYKGAASEAGRAMHLMKKREKQREQMEQMKQRIAEENIMKSNIDKKFSAHYDAVEAELKSSTVGLVTLNDMKAKQEALVKEREKQLAKKEQSKELQMKLEKLREKERKKEAKRKISSLSFTLEEEEEGGEEEEEAAMYEEEMEREEITTKKRKLGKNPDVDTSFLPDRDREEEENRLREELRQEWEAKQEKIKSEEIEITFSYWDGSGHRRTVKMRKGNTMQQFLQKALEILRKDFSELRSAGVEQLMYIKEDLIIPHHHSFYDFIVTKARGKSGPLFNFDVHDDVRLLSDATVEKDESHAGKVVLRSWYEKNKHIFPASRWEPYDPEKKWDKYTIR

SEQ ID NO: 6325 - DNA, 2651 bp, Homo sapiens
cttgaacgcctgacctcgtatccacccgcctcagcctcccaaagtgctgggattacaggcatgagccaccacgcccagcccataatttattgattttttaaaatttgtccagccttctattaccacgtcgaatccattagctacagccatcccatgagaagctgagtggattcagccccacctcctgctcacagaccctgtccgagcacctcatttgtcccaacagcattactgcaggacccccaggacgttggactgccagctccctgggtctcctcctctctggggcagatcctcagtcctcccttgacttcacgactgtggccagatcatgtgtggactgtccctctctttgggtctccagagcgcttgcatcaaacacccctaactcagaagtgtgcagccacactgggactcagaacccaacaacagggacagaagactcacgcccttggggtgcccggtctcgtggcatcaggcatgacttccagctcctgcgccttccccagcaactgctgactggggacccagaccgggagctgagcgacgggcctggcgagcgaagctcggggtctcactcaggcaccagcccctccttgccccaggcttgagtgactcacagccctattcaggcaggagctgctcttctggggtatcgcgatccacttaaggatgaggcagacttggtgacaagctggtctgagcagcgcctccagagccagaactgagcccagtgagagcgcaccctggggcagcctggattcctggggtgtccccggcagccacacacagccatgcactacccaactgcactcctcttcctcatcctggccaatggggcccaggcctttcgcatctgcgccttcaatgcccagcggctgacactggccaaggtggccagggagcaggtgatggacaccttagttcggatactggctcgctgtgacatcatggtgctgcaggaggtggtggactcttccggcagcgccatcccgctcctgcttcgagaactcaatcgatttgatggctctgggccctacagcaccctgagcagcccccagctggggcgcagcacctacatggagacgtatgtgtacttctatcggtcacacaaaacacaggtcctgagttcctacgtgtacaacgatgaggatgacgtctttgcccgggagccatttgtggcccagttctctttgcccagcaatgtccttcccagcctggtgttggtcccgctgcacaccactcctaaggccgtagagaaggagctgaacgccctctacgatgtgtttctggaggtctcccagcactggcagagcaaggacgtgatcctgcttggggacttcaatgctgactgcgcttcactgaccaaaaagcgcctggacaagctggagctgcggactgagccaggcttccactgggtgattgccgatggggaggacaccacagtgcgggccagcacccactgcacctatgcccgcgtcgtgctgcacggggagcgctgccggagtctgctgcacactgcggctgcctttgacttccccacgagcttccagctcaccgaggaggaggccctcaacatcagtgaccactaccccgtggaggtggagctgaagctgagccaggcgcacagcgtccagcctctcagcctcactgttctgttgctgctatcactcctgtcccctcagctgtgccctgctgcctgagcgtccccctacccccccagggcctgctgccttttgggacttaaaccccagcctcccccgtccatccagccctggggctggggggcttcaactatagttgccctgtgactgtagtccacccctgcctgccttgtttgatttggctcttgttctttggttgggcttgtgcctagattaggagaggaagccaggggccctgcactcatgccacctgccaggtagtgtagtatcaggagtggagacaaagtgggctctgggttggggtaggggaagggagggttcagaaagaggaatgaagatgttgtatgacaagaaggaaagttactgagaacaaaaacccagattggtgagataggacacttgtgcagcagatatgccaatgggccatgtttattgtggattggtaagaatcaccaggaaaccattaagccccaatagctacaaggagggtggttaatctgctatatcaaactccttccctgaaaccagcaaacaccgggaaacattttggctcattataatccggtgaacaatgcagtcaggcctgttataaccgctgagcagccacactcgcacctcctgggtgctgtagtctgtgttggtacaggcttctgcatgcctggtaaaggtccagccaaggctggtcaaggcaacatctccacacagaaaatctgcaccagttatgtaagctaaaaagctgtgtgaacccaggtgtcccggaaaggggctgcaggacacagcaaaatgccagcagcatgccggacccctcccttccatcctcctctccaaagaagagaggtcaggaaaaacactggctgggacgctagaagggtcatgtgttaactataatcacatttatggtttggaaccatcaccccaaggtaaaaaaaaaataaaaggtattcccaggtatgtttggcaaaataaaataaaggtaattaaaaacct

SEQ ID NO: 6326 - DNA, 2188 bp, Homo sapiens
ctctttcccttcggtgtgccactgaagatcctggtgtcgccatgggccgccgccccgcccgttgttaccggtattgtaagaacaagccgtacccaaagtctcgcttctgccgaggtgtccctgatgccaagattcgcatttttgacctggggcggaaaaaggcaaaagtggatgagtttccgctttgtggccacatggtgtcagatgaatatgagcagctgtcctctgaagccctggaggctgcccgaatttgtgccaataagtacatggtaaaaagttgtggcaaagatggcttccatatccgggtgcggctccaccccttccacgtcatccgcatcaacaagatgttgtcctgtgctggggctgacaggctccaaacaggcatgcgaggtgcctttggaaagccccagggcactgtggccagggttcacattggccaagttatcatgtccatccgcaccaagctgcagaacaaggagcatgtgattgaggccctgcgcagggccaagttcaagtttcctggccgccagaagatccacatctcaaagaagtggggcttcaccaagttcaatgctgatgaatttgaagacatggtggctgaaaagcggctcatcccagatggctgtggggtcaagtacatccccagtcgtggccctctggacaagtggcgggccctgcactcatgagggcttccaatgtgctgcccccctcttaatactcaccaataaattctacttcctgtccacctatgtctttgtatctacattcttgacggggaaggaacttcctctgggaacctttgggtcattgccctttcacttcagaaacaggttgacaactcagccctgctcatgaggcagcaaaccctgcaaagggctgggactggtggccttatgtcagttgtctactctggagcttgacttggacctccccaggtcctaggcagtaggttgaaaaacactgaagtgcttttcatgaagcacagctgcagcaaagccttgcaatcccaggctggggtcagcctacagttgtgttgcttattacaacacatgcggaccaagaggggcttgtgggctagaggctgaccagcagcgtttatttagcaagggtaggtgtgcatcacattgggcttgttctcacccatctggtttggccattcctccttggtgggaatcatccaggtactgctgaggtcacctgcgatttgccccatttcctatctctagcaacctcctgggccccatgcccccaccccttctagaacctgcattcccagggccttcaccacctgaccaaaggtctaggctaacctttggtcatttgtaacaagacctcggaacagacacgtgtgtggcatggtttggcctggggatcttagatgtctgacctgaactattgtagaacagcgctggcttttgggggagcagcaaaaatgagaggagtgctaggtgggtggcctgagcatctgtatccagggacaggactccaaaggcttttggtcccagagctggggtatgttggccccagcccccagcctgtggctcccaaaaggcctctggttttttgtaatctcagtttacagccatttcttaggtttttaattacctttattttattttgccaaacatacctgggaataccttttattttttttttaccttggggtgatggttccaaaccataaatgtgattatagttaacacatgacccttctagcgtcccagccagtgtttttcctgacctctcttctttggagaggaggatggaagggaggggtccggcatgctgctggcattttgctgtgtcctgcagcccctttccgggacacctgggttcacacagctttttagcttacataactggtgcagattttctgtgtggagatgttgccttgaccagccttggctggactttaccaggcatgcagaagcctgtaccaacacagactacagcacccaggaggtgcgagtgtggctgctcagcggttataacaggcctgactgcattgttcaccggattataatgagccaaaatgtttcccggtgtttgctggtttcagggaaggagtttgatatagcagattaaccaccctccttgtagctattggggcttaatggtttcctggtgattcttaccaatccacaataaacatggcccattggcatatctgcaaaaaaaaaaaaaaaaa

SEQ ID NO: 6327 - protein, 214 aa, Homo sapiens
MGRRPARCYRYCKNKPYPKSRFCRGVPDAKIRIFDLGRKKAKVDEFPLCGHMVSDEYEQLSSEALEAARICANKYMVKSCGKDGFHIRVRLHPFHVIRINKMLSCAGADRLQTGMRGAFGKPQGTVARVHIGQVIMSIRTKLQNKEHVIEALRRAKFKFPGRQKIHISKKWGFTKFNADEFEDMVAEKRLIPDGCGVKYIPSRGPLDKWRALHS

SEQ ID NO: 6328 - DNA, 1147 bp, Homo sapiens
cggccggttttggtaggcccgggccgccgccaggcctccgcctgagcccgcacccgccatggacaactacgcagatctttcggataccgagctgaccaccttgctgcgccggtacaacatcccgcacgggcctgtagtaggatcaactcgtaggctttacgagaagaagatcttcgagtacgagacccagaggcggcggctctcgccccccagctcgtccgccgcctcctcttatagcttctctgacttgaattcgactagaggggatgcagatatgtatgatcttcccaagaaagaggacgctttactctaccagagcaagggctacaatgacgactactatgaagagagctacttcaccaccaggacttatggggagcccgagtctgccggcccgtccagggctgtccgccagtcagtgacttcattcccagatgctgacgctttccatcaccaggtgcatgatgacgatcttttgtcttcttctgaagaggagtgcaaggatagggaacgccccatgtacggccgggacagtgcctaccagagcatcacgcactaccgccctgtttcagcctccaggagctccctggacctgtcctattatcctacttcctcctccacctcttttatgtcctcctcatcatcttcctcttcatggctcacccgccgtgccatccggcctgaaaaccgtgctcctggggctgggctgggccaggatcgccaggtcccgctctggggccagctgctgcttttcctggtctttgtgatcgtcctcttcttcatttaccacttcatgcaggctgaagaaggcaaccccttctagagggagccatgagggtctgggcttcagagctaggtctttggggaagtcctggctgactgccttagcagtgggggtgggggtgggggcaggggcaggggctttatgtgtttttgcttggggggcgctgggcctagcccagagtagtgcttgctccccctgccttgtcccaccagggaggcagcagactcaggccctccatggtcctctttgtcattttgttgacatgcattcctccttttgtcatcttgttggggggaggggattaaccaaaggccaccctgactttgtttttgtggacacacaataaaagccccgtttatttgt

SEQ ID NO: 6329 - DNA, 8410 bp, Homo sapiens
gcgatccgggcgccaccccgcggtcatcggtcaccggtcgctctcaggaacagcagcgcaacctctgctccctgcctcgcctcccgcgcgcctaggtgcctgcgactttaattaaagggccgtcccctcgccgaggctgcagcaccgcccccccggcttctcgcgcctcaaaatgagtagctcccactctcgggcgggccagagcgcagcaggcgcggctccgggcggcggcgtcgacacgcgggacgccgagatgccggccaccgagaaggacctggcggaggacgcgccgtggaagaagatccagcagaacactttcacgcgctggtgcaacgagcacctgaagtgcgtgagcaagcgcatcgccaacctgcagacggacctgagcgacgggctgcggcttatcgcgctgttggaggtgctcagccagaagaagatgcaccgcaagcacaaccagcggcccactttccgccaaatgcagcttgagaacgtgtcggtggcgctcgagttcctggaccgcgagagcatcaaactggtgtccatcgacagcaaggccatcgtggacgggaacctgaagctgatcctgggcctcatctggaccctgatcctgcactactccatctccatgcccatgtgggacgaggaggaggatgaggaggccaagaagcagacccccaagcagaggctcctgggctggatccagaacaagctgccgcagctgcccatcaccaacttcagccgggactggcagagcggccgggccctgggcgccctggtggacagctgtgccccgggcctgtgtcctgactgggactcttgggacgccagcaagcccgttaccaatgcgcgagaggccatgcagcaggcggatgactggctgggcatcccccaggtgatcacccccgaggagattgtggaccccaacgtggacgagcactctgtcatgacctacctgtcccagttccccaaggccaagctgaagccaggggctcccttgcggcccaaactgaacccgaagaaagcccgtgcctacgggccaggcatcgagcccacaggcaacatggtgaagaagcgggcagagttcactgtggagaccagaagtgctggccagggagaggtgctggtgtacgtggaggacccggccggacaccaggaggaggcaaaagtgaccgccaataacgacaagaaccgcaccttctccgtctggtacgtccccgaggtgacggggactcataaggttactgtgctctttgctggccagcacatcgccaagagccccttcgaggtgtacgtggataagtcacagggtgacgccagcaaagtgacagcccaaggtcccggcctggagcccagtggcaacatcgccaacaagaccacctactttgagatctttacggcaggagctggcacgggcgaggtcgaggttgtgatccaggaccccatgggacagaagggcacggtagagcctcagctggaggcccggggcgacagcacataccgctgcagctaccagcccaccatggagggcgtccacaccgtgcacgtcacgtttgccggcgtgcccatccctcgcagcccctacactgtcactgttggccaagcctgtaacccgagtgcctgccgggcggttggccggggcctccagcccaagggtgtgcgggtgaaggagacagctgacttcaaggtgtacacaaagggcgctggcagtggggagctgaaggtcaccgtgaagggccccaagggagaggagcgcgtgaagcagaaggacctgggggatggcgtgtatggcttcgagtattaccccatggtccctggaacctatatcgtcaccatcacgtggggtggtcagaacatcgggcgcagtcccttcgaagtgaaggtgggcaccgagtgtggcaatcagaaggtacgggcctggggccctgggctggagggcggcgtcgttggcaagtcagcagactttgtggtggaggctatcggggacgacgtgggcacgctgggcttctcggtggaagggccatcgcaggctaagatcgaatgtgacgacaagggcgacggctcctgtgatgtgcgctactggccgcaggaggctggcgagtatgccgttcacgtgctgtgcaacagcgaagacatccgcctcagccccttcatggctgacatccgtgacgcgccccaggacttccacccagacagggtgaaggcacgtgggcctggattggagaagacaggtgtggccgtcaacaagccagcagagttcacagtggatgccaagcacggtggcaaggccccacttcgggtccaagtccaggacaatgaaggctgccctgtggaggcgttggtcaaggacaacggcaatggcacttacagctgctcctacgtgcccaggaagccggtgaagcacacagccatggtgtcctggggaggcgtcagcatccccaacagccccttcagggtgaatgtgggagctggcagccaccccaacaaggtcaaagtatacggccccggagtagccaagacagggctcaaggcccacgagcccacctacttcactgtggactgcgccgaggctggccagggggacgtcagcatcggcatcaagtgtgcccctggagtggtaggccccgccgaagctgacatcgacttcgacatcatccgcaatgacaatgacaccttcacggtcaagtacacgccccggggggctggcagctacaccattatggtcctctttgctgaccaggccacgcccaccagccccatccgagtcaaggtggagccctctcatgacgccagtaaggtgaaggccgagggccctggcctcagtcgcactggtgtcgagcttggcaagcccacccacttcacagtaaatgccaaagctgctggcaaaggcaagctggacgtccagttctcaggactcaccaagggggatgcagtgcgagatgtggacatcatcgaccaccatgacaacacctacacagtcaagtacacgcctgtccagcagggtccagtaggcgtcaatgtcacttatggaggggatcccatccctaagagccctttctcagtggcagtatctccaagcctggacctcagcaagatcaaggtgtctggcctgggagagaaggtggacgttggcaaagaccaggagttcacagtcaaatcaaagggtgctggtggtcaaggcaaagtggcatccaagattgtgggcccctcgggtgcagcggtgccctgcaaggtggagccaggcctgggggctgacaacagtgtggtgcgcttcctgccccgtgaggaagggccctatgaggtggaggtgacctatgacggcgtgcccgtgcctggcagcccctttcctctggaagctgtggcccccaccaagcctagcaaggtgaaggcgtttgggccggggctgcagggaggcagtgcgggctcccccgcccgcttcaccatcgacaccaagggcgccggcacaggtggcctgggcctgacggtggagggcccctgtgaggcgcagctcgagtgcttggacaatggggatggcacatgttccgtgtcctacgtgcccaccgagcccggggactacaacatcaacatcctcttcgctgacacccacatccctggctccccattcaaggcccacgtggttccctgctttgacgcatccaaagtcaagtgctcaggccccgggctggagcgggccaccgctggggaggtgggccaattccaagtggactgctcgagcgcgggcagcgcggagctgaccattgagatctgctcggaggcggggcttccggccgaggtgtacatccaggaccacggtgatggcacgcacaccattacctacattcccctctgccccggggcctacaccgtcaccatcaagtacggcggccagcccgtgcccaacttccccagcaagctgcaggtggaacctgcggtggacacttccggtgtccagtgctatgggcctggtattgagggccagggtgtcttccgtgaggccaccactgagttcagtgtggacgcccgggctctgacacagaccggagggccgcacgtcaaggcccgtgtggccaacccctcaggcaacctgacggagacctacgttcaggaccgtggcgatggcatgtacaaagtggagtacacgccttacgaggagggactgcactccgtggacgtgacctatgacggcagtcccgtgcccagcagccccttccaggtgcccgtgaccgagggctgcgacccctcccgggtgcgtgtccacgggccaggcatccaaagtggcaccaccaacaagcccaacaagttcactgtggagaccaggggagctggcacgggcggcctgggcctggctgtagagggcccctccgaggccaagatgtcctgcatggataacaaggacggcagctgctcggtcgagtacatcccttatgaggctggcacctacagcctcaacgtcacctatggtggccatcaagtgccaggcagtcctttcaaggtccctgtgcatgatgtgacagatgcgtccaaggtcaagtgctctgggcccggcctgagcccaggcatggttcgtgccaacctccctcagtccttccaggtggacacaagcaaggctggtgtggccccattgcaggtcaaagtgcaagggcccaaaggcctggtggagccagtggacgtggtagacaacgctgatggcacccagaccgtcaattatgtgcccagccgagaagggccctacagcatctcagtactgtatggagatgaagaggtaccccggagccccttcaaggtcaaggtgctgcctactcatgatgccagcaaggtgaaggccagtggccccgggctcaacaccactggcgtgcctgccagcctgcccgtggagttcaccatcgatgcaaaggacgccggggagggcctgctggctgtccagatcacggatcccgaaggcaagccgaagaagacacacatccaagacaaccatgacggcacgtatacagtggcctacgtgccagacgtgacaggtcgctacaccatcctcatcaagtacggtggtgacgagatccccttctccccgtaccgcgtgcgtgccgtgcccaccggggacgccagcaagtgcactgtcacaggtgctggcatcggccccaccattcagattggggaggagacggtgatcactgtggacactaaggcggcaggcaaaggcaaagtgacgtgcaccgtgtgcacgcctgatggctcagaggtggatgtggacgtggtggagaatgaggacggcactttcgacatcttctacacggccccccagccgggcaaatacgtcatctgtgtgcgctttggtggcgagcacgtgcccaacagccccttccaagtgacggctctggctggggaccagccctcggtgcagccccctctacggtctcagcagctggccccacagtacacctacgcccagggcggccagcagacttgggccccggagaggcccctggtgggtgtcaatgggctggatgtgaccagcctgaggccctttgaccttgtcatccccttcaccatcaagaagggcgagatcacaggggaggttcggatgccctcaggcaaggtggcgcagcccaccatcactgacaacaaagacggcaccgtgaccgtgcggtatgcacccagcgaggctggcctgcacgagatggacatccgctatgacaacatgcacatcccaggaagccccttgcagttctatgtggattacgtcaactgtggccatgtcactgcctatgggcctggcctcacccatggagtagtgaacaagcctgccaccttcaccgtcaacaccaaggatgcaggagaggggggcctgtctctggccattgagggcccgtccaaagcagaaatcagctgcactgacaaccaggatgggacatgcagcgtgtcctacctgcctgtgctgccgggggactacagcattctagtcaagtacaatgaacagcacgtcccaggcagccccttcactgctcgggtcacaggtgacgactccatgcgtatgtcccacctaaaggtcggctctgctgccgacatccccatcaacatctcagagacggatctcagcctgctgacggccactgtggtcccgccctcgggccgggaggagccctgtttgctgaagcggctgcgtaatggccacgtggggatttcattcgtgcccaaggagacgggggagcacctggtgcatgtgaagaaaaatggccagcacgtggccagcagccccatcccggtggtgatcagccagtcggaaattggggatgccagtcgtgttcgggtctctggtcagggccttcacgaaggccacacctttgagcctgcagagtttatcattgatacccgcgatgcaggctatggtgggctcagcctgtccattgagggccccagcaaggtggacatcaacacagaggacctggaggacgggacgtgcagggtcacctactgccccacagagccaggcaactacatcatcaacatcaagtttgccgaccagcacgtgcctggcagccccttctctgtgaaggtgacaggcgagggccgggtgaaagagagcatcacccgcaggcgtcgggctccttcagtggccaacgttggtagtcattgtgacctcagcctgaaaatccctgaaattagcatccaggatatgacagcccaggtgaccagcccatcgggcaagacccatgaggccgagatcgtggaaggggagaaccacacctactgcatccgctttgttcccgctgagatgggcacacacacagtcagcgtgaagtacaagggccagcacgtgcctgggagccccttccagttcaccgtggggcccctaggggaagggggagcccacaaggtccgagctgggggccctggcctggagagagctgaagctggagtgccagccgaattcagtatctggacccgggaagctggtgctggaggcctggccattgctgtcgagggccccagcaaggctgagatctcttttgaggaccgcaaggacggctcctgtggtgtggcttatgtggtccaggagccaggtgactacgaagtctcagtcaagttcaacgaggaacacattcccgacagccccttcgtggtgcctgtggcttctccgtctggcgacgcccgccgcctcactgtttctagccttcaggagtcagggctaaaggtcaaccagccagcctcttttgcagtcagcctgaacggggccaagggggcgatcgatgccaaggtgcacagcccctcaggagccctggaggagtgctatgtcacagaaattgaccaagataagtatgctgtgcgcttcatccctcgggagaatggcgtttacctgattgacgtcaagttcaacggcacccacatccctggaagccccttcaagatccgagttggggagcctgggcatggaggggacccaggcttggtgtctgcttacggagcaggtctggaaggcggtgtcacagggaacccagctgagttcgtcgtgaacacgagcaatgcgggagctggtgccctgtcggtgaccattgacggcccctccaaggtgaagatggattgccaggagtgccctgagggctaccgcgtcacctatacccccatggcacctggcagctacctcatctccatcaagtacggcggcccctaccacattgggggcagccccttcaaggccaaagtcacaggcccccgtctcgtcagcaaccacagcctccacgagacatcatcagtgtttgtagactctctgaccaaggccacctgtgccccccagcatggggccccgggtcctgggcctgctgacgccagcaaggtggtggccaagggcctggggctgagcaaggcctacgtaggccagaagagcagcttcacagtagactgcagcaaagcaggcaacaacatgctgctggtgggggttcatggcccaaggaccccctgcgaggagatcctggtgaagcacgtgggcagccggctctacagcgtgtcctacctgctcaaggacaagggggagtacacactggtggtcaaatggggggacgagcacatcccaggcagcccctaccgcgttgtggtgccctgagtctggggcccgtgccagccggcagcccccaagcctgccccgctacccaagcagccccgccctcttcccctcaaccccggcccaggccgccctggccgcccgcctgtcactgcagccgcccctgccctgtgccgtgctgcgctcacctgcctccccagccagccgctgacctctcggctttcacttgggcagagggagccatttggtggcgctgcttgtcttctttggttctgggaggggtgagggatgggggtcctgtacacaaccacccactagttctcttctccagccaagaggaataaagttttgcttccattc

SEQ ID NO: 6330 - DNA, 10182 bp, Homo sapiens
ccggaaaatggccgccgccgccgccgccgcgccgagcggaggaggaggaggaggcgaggaggagagactgctccataaaaatacagactcaccagttcctgctttgatgtgacatgtgactccccagaatacaccttgcttctgtagaccagctccaacaggattccatggtagctgggatgttagggctcagggaagaaaagtcagaagaccaggacctccagggcctcaaggacaaacccctcaagtttaaaaaggtgaagaaagataagaaagaagagaaagagggcaagcatgagcccgtgcagccatcagcccaccactctgctgagcccgcagaggcaggcaaagcagagacatcagaagggtcaggctccgccccggctgtgccggaagcttctgcctcccccaaacagcggcgctccatcatccgtgaccggggacccatgtatgatgaccccaccctgcctgaaggctggacacggaagcttaagcaaaggaaatctggccgctctgctgggaagtatgatgtgtatttgatcaatccccagggaaaagcctttcgctctaaagtggagttgattgcgtacttcgaaaaggtaggcgacacatccctggaccctaatgattttgacttcacggtaactgggagagggagcccctcccggcgagagcagaaaccacctaagaagcccaaatctcccaaagctccaggaactggcagaggccggggacgccccaaagggagcggcaccacgagacccaaggcggccacgtcagagggtgtgcaggtgaaaagggtcctggagaaaagtcctgggaagctccttgtcaagatgccttttcaaacttcgccagggggcaaggctgaggggggtggggccaccacatccacccaggtcatggtgatcaaacgccccggcaggaagcgaaaagctgaggccgaccctcaggccattcccaagaaacggggccgaaagccggggagtgtggtggcagccgctgccgccgaggccaaaaagaaagccgtgaaggagtcttctatccgatctgtgcaggagaccgtactccccatcaagaagcgcaagacccgggagacggtcagcatcgaggtcaaggaagtggtgaagcccctgctggtgtccaccctcggtgagaagagcgggaaaggactgaagacctgtaagagccctgggcggaaaagcaaggagagcagccccaaggggcgcagcagcagcgcctcctcaccccccaagaaggagcaccaccaccatcaccaccactcagagtccccaaaggcccccgtgccactgctcccacccctgcccccacctccacctgagcccgagagctccgaggaccccaccagcccccctgagccccaggacttgagcagcagcgtctgcaaagaggagaagatgcccagaggaggctcactggagagcgacggctgccccaaggagccagctaagactcagcccgcggttgccaccgccgccacggccgcagaaaagtacaaacaccgaggggagggagagcgcaaagacattgtttcatcctccatgccaaggccaaacagagaggagcctgtggacagccggacgcccgtgaccgagagagttagctgactttacacggagcggattgcaaagcaaaccaacaagaataaaggcagctgttgtctcttctccttatgggtagggctctgacaaagcttcccgattaactgaaataaaaaatatttttttttctttcagtaaacttagagtttcgtggcttcagggtgggagtagttggagcattggggatgtttttcttaccgacaagcacagtcaggttgaagacctaaccagggccagaagtagctttgcacttttctaaactaggctccttcaacaaggcttgctgcagatactactgaccagacaagctgttgaccaggcacctcccctcccgcccaaacctttcccccatgtggtcgttagagacagagcgacagagcagttgagaggacactcccgttttcggtgccatcagtgccccgtctacagctcccccagctccccccacctcccccactcccaaccacgttgggacagggaggtgtgaggcaggagagacagttggattctttagagaagatggatatgaccagtggctatggcctgtgcgatcccacccgtggtggctcaagtctggccccacaccagccccaatccaaaactggcaaggacgcttcacaggacaggaaagtggcacctgtctgctccagctctggcatggctaggaggggggagtcccttgaactactgggtgtagactggcctgaaccacaggagaggatggcccagggtgaggtggcatggtccattctcaagggacgtcctccaacgggtggcgctagaggccatggaggcagtaggacaaggtgcaggcaggctggcctggggtcaggccgggcagagcacagcggggtgagagggattcctaatcactcagagcagtctgtgacttagtggacaggggagggggcaaagggggaggagaagaaaatgttcttccagttactttccaattctcctttagggacagcttagaattatttgcactattgagtcttcatgttcccacttcaaaacaaacagatgctctgagagcaaactggcttgaattggtgacatttagtccctcaagccaccagatgtgacagtgttgagaactacctggatttgtatatatacctgcgcttgttttaaagtgggctcagcacatagggttcccacgaagctccgaaactctaagtgtttgctgcaattttataaggacttcctgattggtttctcttctccccttccatttctgccttttgttcatttcatcctttcacttctttcccttcctccgtcctcctccttcctagttcatcccttctcttccaggcagccgcggtgcccaaccacacttgtcggctccagtccccagaactctgcctgccctttgtcctcctgctgccagtaccagccccaccctgttttgagccctgaggaggccttgggctctgctgagtccgacctggcctgtctgtgaagagcaagagagcagcaaggtcttgctctcctaggtagccccctcttccctggtaagaaaaagcaaaaggcatttcccaccctgaacaacgagccttttcacccttctactctagagaagtggactggaggagctgggcccgatttggtagttgaggaaagcacagaggcctcctgtggcctgccagtcatcgagtggcccaacaggggctccatgccagccgaccttgacctcactcagaagtccagagtctagcgtagtgcagcagggcagtagcggtaccaatgcagaactcccaagacccgagctgggaccagtacctgggtccccagcccttcctctgctcccccttttccctcggagttcttcttgaatggcaatgttttgcttttgctcgatgcagacagggggccagaacaccacacatttcactgtctgtctggtccatagctgtggtgtaggggcttagaggcatgggcttgctgtgggtttttaattgatcagttttcatgtgggatcccatctttttaacctctgttcaggaagtccttatctagctgcatatcttcatcatattggtatatccttttctgtgtttacagagatgtctcttatatctaaatctgtccaactgagaagtaccttatcaaagtagcaaatgagacagcagtcttatgcttccagaaacacccacaggcatgtcccatgtgagctgctgccatgaactgtcaagtgtgtgttgtcttgtgtatttcagttattgtccctggcttccttactatggtgtaatcatgaaggagtgaaacatcatagaaactgtctagcacttccttgccagtctttagtgatcaggaaccatagttgacagttccaatcagtagcttaagaaaaaaccgtgtttgtctcttctggaatggttagaagtgagggagtttgccccgttctgtttgtagagtctcatagttggactttctagcatatatgtgtccatttccttatgctgtaaaagcaagtcctgcaaccaaactcccatcagcccaatccctgatccctgatcccttccacctgctctgctgatgacccccccagcttcacttctgactcttccccaggaagggaaggggggtcagaagagagggtgagtcctccagaactcttcctccaaggacagaaggctcctgcccccatagtggcctcgaactcctggcactaccaaaggacacttatccacgagagcgcagcatccgaccaggttgtcactgagaagatgtttattttggtcagttgggtttttatgtattatacttagtcaaatgtaatgtggcttctggaatcattgtccagagctgcttccccgtcacctgggcgtcatctggtcctggtaagaggagtgcgtggcccaccaggcccccctgtcacccatgacagttcattcagggccgatggggcagtcgtggttgggaacacagcatttcaagcgtcactttatttcattcgggccccacctgcagctccctcaaagaggcagttgcccagcctctttcccttccagtttattccagagctgccagtggggcctgaggctccttagggttttctctctatttccccctttcttcctcattccctcgtctttcccaaaggcatcacgagtcagtcgcctttcagcaggcagccttggcggtttatcgccctggcaggcaggggccctgcagctctcatgctgcccctgccttggggtcaggttgacaggaggttggagggaaagccttaagctgcaggattctcaccagctgtgtccggcccagttttggggtgtgacctcaatttcaattttgtctgtacttgaacattatgaagatgggggcctctttcagtgaatttgtgaacagcagaattgaccgacagctttccagtacccatggggctaggtcattaaggccacatccacagtctcccccacccttgttccagttgttagttactacctcctctcctgacaatactgtatgtcgtcgagctccccccaggtctacccctcccggccctgcctgctggtgggcttgtcatagccagtgggattgccggtcttgacagctcagtgagctggagatacttggtcacagccaggcgctagcacagctcccttctgttgatgctgtattcccatatcaaaagacacaggggacacccagaaacgccacatcccccaatccatcagtgccaaactagccaacggccccagcttctcagctcgctggatggcggaagctgctactcgtgagcgccagtgcgggtgcagacaatcttctgttgggtggcatcattccaggcccgaagcatgaacagtgcacctgggacagggagcagccccaaattgtcacctgcttctctgcccagcttttcattgctgtgacagtgatggcgaaagagggtaataaccagacacaaactgccaagttgggtggagaaaggagtttctttagctgacagaatctctgaattttaaatcacttagtaagcggctcaagcccaggagggagcagagggatacgagcggagtcccctgcgcgggaccatctggaattggtttagcccaagtggagcctgacagccagaactctgtgtcccccgtctaaccacagctccttttccagagcattccagtcaggctctctgggctgactgggccaggggaggttacaggtaccagttctttaagaagatctttgggcatatacatttttagcctgtgtcattgccccaaatggattcctgtttcaagttcacacctgcagattctaggacctgtgtcctagacttcagggagtcagctgtttctagagttcctaccatggagtgggtctggaggacctgcccggtgggggggcagagccctgctccctccgggtcttcctactcttctctctgctctgacgggatttgttgattctctccattttggtgtctttctcttttagatattgtatcaatctttagaaaaggcatagtctacttgttataaatcgttaggatactgcctcccccagggtctaaaattacatattagaggggaaaagctgaacactgaagtcagttctcaacaatttagaaggaaaacctagaaaacatttggcagaaaattacatttcgatgtttttgaatgaatacgagcaagcttttacaacagtgctgatctaaaaatacttagcacttggcctgagatgcctggtgagcattacaggcaaggggaatctggaggtagccgacctgaggacatggcttctgaacctgtcttttgggagtggtatggaaggtggagcgttcaccagtgacctggaaggcccagcaccaccctccttcccactcttctcatcttgacagagcctgccccagcgctgacgtgtcaggaaaacacccagggaactaggaaggcacttctgcctgaggggcagcctgccttgcccactcctgctctgctcgcctcggatcagctgagccttctgagctggcctctcactgcctccccaaggccccctgcctgccctgtcaggaggcagaaggaagcaggtgtgagggcagtgcaaggagggagcacaacccccagctcccgctccgggctccgacttgtgcacaggcagagcccagaccctggaggaaatcctacctttgaattcaagaacatttggggaatttggaaatctctttgcccccaaacccccattctgtcctacctttaatcaggtcctgctcagcagtgagagcagatgaggtgaaaaggccaagaggtttggctcctgcccactgatagcccctctccccgcagtgtttgtgtgtcaagtggcaaagctgttcttcctggtgaccctgattatatccagtaacacatagactgtgcgcataggcctgctttgtctcctctatcctgggcttttgttttgctttttagttttgcttttagtttttctgtcccttttatttaacgcaccgactagacacacaaagcagttgaatttttatatatatatctgtatattgcacaattataaactcattttgcttgtggctccacacacacaaaaaaagacctgttaaaattatacctgttgcttaattacaatatttctgataaccatagcataggacaagggaaaataaaaaaagaaaaaaaagaaaaaaaaacgacaaatctgtctgctggtcacttcttctgtccaagcagattcgtggtcttttcctcgcttctttcaagggctttcctgtgccaggtgaaggaggctccaggcagcacccaggttttgcactcttgtttctcccgtgcttgtgaaagaggtcccaaggttctgggtgcaggagcgctcccttgacctgctgaagtccggaacgtagtcggcacagcctggtcgccttccacctctgggagctggagtccactggggtggcctgactcccccagtccccttcccgtgacctggtcagggtgagcccatgtggagtcagcctcgcaggcctccctgccagtagggtccgagtgtgtttcatccttcccactctgtcgagcctgggggctggagcggagacgggaggcctggcctgtctcggaacctgtgagctgcaccaggtagaacgccagggaccccagaatcatgtgcgtcagtccaaggggtcccctccaggagtagtgaagactccagaaatgtccctttcttctcccccatcctacgagtaattgcatttgcttttgtaattcttaatgagcaatatctgctagagagtttagctgtaacagttctttttgatcatctttttttaataattagaaacaccaaaaaaatccagaaacttgttcttccaaagcagagagcattataatcaccagggccaaaagcttccctccctgctgtcattgcttcttctgaggcctgaatccaaaagaaaaacagccataggccctttcagtggccgggctacccgtgagcccttcggaggaccagggctggggcagcctctgggcccacatccggggccagctccggcgtgtgttcagtgttagcagtgggtcatgatgctctttcccacccagcctgggataggggcagaggaggcgaggaggccgttgccgctgatgtttggccgtgaacaggtgggtgtctgcgtgcgtccacgtgcgtgttttctgactgacatgaaatcgacgcccgagttagcctcacccggtgacctctagccctgcccggatggagcggggcccacccggttcagtgtttctggggagctggacagtggagtgcaaaaggcttgcagaacttgaagcctgctccttcccttgctaccacggcctcctttccgtttgatttgtcactgcttcaatcaataacagccgctccagagtcagtagtcaatgaatatatgaccaaatatcaccaggactgttactcaatgtgtgccgagcccttgcccatgctgggctcccgtgtatctggacactgtaacgtgtgctgtgtttgctccccttccccttccttctttgccctttacttgtctttctggggtttttctgtttgggtttggtttggtttttatttctccttttgtgttccaaacatgaggttctctctactggtcctcttaactgtggtgttgaggcttatatttgtgtaatttttggtgggtgaaaggaattttgctaagtaaatctcttctgtgtttgaactgaagtctgtattgtaactatgtttaaagtaattgttccagagacaaatatttctagacactttttctttacaaacaaaagcattcggagggagggggatggtgactgagatgagaggggagagctgaacagatgacccctgcccagatcagccagaagccacccaaagcagtggagcccaggagtcccactccaagccagcaagccgaatagctgatgtgttgccactttccaagtcactgcaaaaccaggttttgttccgcccagtggattcttgttttgcttcccctccccccgagattattaccaccatcccgtgcttttaaggaaaggcaagattgatgtttccttgaggggagccaggaggggatgtgtgtgtgcagagctgaagagctggggagaatggggctgggcccacccaagcaggaggctgggacgctctgctgtgggcacaggtcaggctaatgttggcagatgcagctcttcctggacaggccaggtggtgggcattctctctccaaggtgtgccccgtgggcattactgtttaagacacttccgtcacatcccaccccatcctccagggctcaacactgtgacatctctattccccaccctccccttcccagggcaataaaatgaccatggagggggcttgcactctcttggctgtcacccgatcgccagcaaaacttagatgtgagaaaaccccttcccattccatggcgaaaacatctccttagaaaagccattaccctcattaggcatggttttgggctcccaaaacacctgacagcccctccctcctctgagaggcggagagtgctgactgtagtgaccattgcatgccgggtgcagcatctggaagagctaggcagggtgtctgccccctcctgagttgaagtcatgctcccctgtgccagcccagaggccgagagctatggacagcattgccagtaacacaggccaccctgtgcagaagggagctggctccagcctggaaacctgtctgaggttgggagaggtgcacttggggcacagggagaggccgggacacacttagctggagatgtctctaaaagccctgtatcgtattcaccttcagtttttgtgttttgggacaattactttagaaaataagtaggtcgttttaaaaacaaaaattattgattgcttttttgtagtgttcagaaaaaaggttctttgtgtatagccaaatgactgaaagcactgatatatttaaaaacaaaaggcaatttattaaggaaatttgtaccatttcagtaaacctgtctgaatgtacctgtatacgtttcaaaaacaccccccccccactgaatccctgtaacctatttattatataaagagtttgccttataaattt

SEQ ID NO: 6331 - protein, 486 aa, Homo sapiens
MVAGMLGLREEKSEDQDLQGLKDKPLKFKKVKKDKKEEKEGKHEPVQPSAHHSAEPAEAGKAETSEGSGSAPAVPEASASPKQRRSIIRDRGPMYDDPTLPEGWTRKLKQRKSGRSAGKYDVYLINPQGKAFRSKVELIAYFEKVGDTSLDPNDFDFTVTGRGSPSRREQKPPKKPKSPKAPGTGRGRGRPKGSGTTRPKAATSEGVQVKRVLEKSPGKLLVKMPFQTSPGGKAEGGGATTSTQVMVIKRPGRKRKAEADPQAIPKKRGRKPGSVVAAAAAEAKKKAVKESSIRSVQETVLPIKKRKTRETVSIEVKEVVKPLLVSTLGEKSGKGLKTCKSPGRKSKESSPKGRSSSASSPPKKEHHHHHHHSESPKAPVPLLPPLPPPPPEPESSEDPTSPPEPQDLSSSVCKEEKMPRGGSLESDGCPKEPAKTQPAVATAATAAEKYKHRGEGERKDIVSSSMPRPNREEPVDSRTPVTERVS

SEQ ID NO: 6332 - DNA, 3583 bp, Homo sapiens
cgcggacccggccggcccaggcccgcgcccgccgcggccctgagaggccccggcaggtcccggcccggcggcggcagccatggccggggggccgggcccgggggagcccgcagcccccggcgcccagcacttcttgtacgaggtgccgccctgggtcatgtgccgcttctacaaagtgatggacgccctggagcccgccgactggtgccagttcgccgccctgatcgtgcgcgaccagaccgagctgcggctgtgcgagcgctccgggcagcgcacggccagcgtcctgtggccctggatcaaccgcaacgcccgtgtggccgacctcgtgcacatcctcacgcacctgcagctgctccgtgcgcgggacatcatcacagcctggcaccctcccgccccgcttccgtccccaggcaccactgccccgaggcccagcagcatccctgcacccgccgaggccgaggcctggagcccccggaagttgccatcctcagcctccaccttcctctccccagcttttccaggctcccagacccattcagggcctgagctcggcctggttccaagccctgcttccctgtggcctccaccgccatctccagccccttcttctaccaagccaggcccagagagctcagtgtccctcctgcagggagcccgcccctctccgttttgctggcccctctgtgagatttcccggggcacccacaacttctcggaggagctcaagatcggggagggtggctttgggtgcgtgtaccgggcggtgatgaggaacacggtgtatgctgtgaagaggctgaaggagaacgctgacctggagtggactgcagtgaagcagagcttcctgaccgaggtggagcagctgtccaggtttcgtcacccaaacattgtggactttgctggctactgtgctcagaacggcttctactgcctggtgtacggcttcctgcccaacggctccctggaggaccgtctccactgccagacccaggcctgcccacctctctcctggcctcagcgactggacatccttctgggtacagcccgggcaattcagtttctacatcaggacagccccagcctcatccatggagacatcaagagttccaacgtccttctggatgagaggctgacacccaagctgggagactttggcctggcccggttcagccgctttgccgggtccagccccagccagagcagcatggtggcccggacacagacagtgcggggcaccctggcctacctgcccgaggagtacatcaagacgggaaggctggctgtggacacggacaccttcagctttggggtggtagtgctagagaccttggctggtcagagggctgtgaagacgcacggtgccaggaccaagtatctgaaagacctggtggaagaggaggctgaggaggctggagtggctttgagaagcacccagagcacactgcaagcaggtctggctgcagatgcctgggctgctcccatcgccatgcagatctacaagaagcacctggaccccaggcccgggccctgcccacctgagctgggcctgggcctgggccagctggcctgctgctgcctgcaccgccgggccaaaaggaggcctcctatgacccaggtgtacgagaggctagagaagctgcaggcagtggtggcgggggtgcccgggcatttggaggccgccagctgcatccccccttccccgcaggagaactcctacgtgtccagcactggcagagcccacagtggggctgctccatggcagcccctggcagcgccatcaggagccagtgcccaggcagcagagcagctgcagagaggccccaaccagcccgtggagagtgacgagagcctaggcggcctctctgctgccctgcgctcctggcacttgactccaagctgccctctggacccagcacccctcagggaggccggctgtcctcagggggacacggcaggagaatcgagctgggggagtggcccaggatcccggcccacagccgtggaaggactggcccttggcagctctgcatcatcgtcgtcagagccaccgcagattatcatcaaccctgcccgacagaagatggtccagaagctggccctgtacgaggatggggccctggacagcctgcagctgctgtcgtccagctccctcccaggcttgggcctggaacaggacaggcaggggcccgaagaaagtgatgaatttcagagctgatgtgttcacctgggcagatcccccaaatccggaagtcaaagttctcatggtcagaagttctcatggtgcacgagtcctcagcactctgccggcagtgggggtgggggcccatgcccgcgggggagagaaggaggtggccctgctgttctaggctctgtgggcataggcaggcagagtggaaccctgcctccatgccagcatctgggggcaaggaaggctggcatcatccagtgaggaggctggcgcatgttgggaggctgctggctgcacagacccgtgaggggaggagaggggctgctgtgcaggggtgtggagtagggagctggctcccctgagagccatgcagggcgtctgcagcccaggcctctggcagcagctctttgcccatctctttggacagtggccaccctgcacaatggggccgacgaggcctagggccctcctacctgcttacaatttggaaaagtgtggccgggtgcggtggctcacgcctgtaatcccagcactttgggaggccaaggcaggaggatcgctggagcccagtaggtcaagaccagccagggcaacatgatgagaccctgtctctgccaaaaaattttttaaactattagcctggcgtggtagcgcacgcctgtggtcccagctgctggggaggctgaagtaggaggatcatttatgcttgggaggtcgaggctgcagtgagtcatgattgtatgactgcactccagcctgggtgacagagcaagaccctgtttcaaaaagaaaaaccctgggaaaagtgaagtatggctgtaagtctcatggttcagtcctagcaagaagcgagaattctgagatcctccagaaagtcgagcagcacccacctccaacctcgggccagtgtcttcaggctttactggggacctgcgagctggcctaatgtggtggcctgcaagccaggccatccctgggcgccacagacgagctccgagccaggtcaggcttcggaggccacaagctcagcctcaggcccaggcactgattgtggcagaggggccactacccaaggtctagctaggcccaagacctagttacccagacagtgagaagcccctggaaggcagaaaagttgggagcatggcagacagggaagggaaacattttcagggaaaagacatgtatcacatgtcttcagaagcaagtcaggtttcatgtaaccgagtgtcctcttgcgtgtccaaaagtagcccagggctgtagcacaggcttcacagtgattttgtgttcagccgtgagtcacactacatgcccccgtgaagctgggcattggtgacgtccaggttgtccttgagtaataaaaacgtatgttccctaaaaaaaaaaaaa

SEQ ID NO: 6333 - protein, 712 aa, Homo sapiens
MAGGPGPGEPAAPGAQHFLYEVPPWVMCRFYKVMDALEPADWCQFAALIVRDQTELRLCERSGQRTASVLWPWINRNARVADLVHILTHLQLLRARDIITAWHPPAPLPSPGTTAPRPSSIPAPAEAEAWSPRKLPSSASTFLSPAFPGSQTHSGPELGLVPSPASLWPPPPSPAPSSTKPGPESSVSLLQGARPSPFCWPLCEISRGTHNFSEELKIGEGGFGCVYRAVMRNTVYAVKRLKENADLEWTAVKQSFLTEVEQLSRFRHPNIVDFAGYCAQNGFYCLVYGFLPNGSLEDRLHCQTQACPPLSWPQRLDILLGTARAIQFLHQDSPSLIHGDIKSSNVLLDERLTPKLGDFGLARFSRFAGSSPSQSSMVARTQTVRGTLAYLPEEYIKTGRLAVDTDTFSFGVVVLETLAGQRAVKTHGARTKYLKDLVEEEAEEAGVALRSTQSTLQAGLAADAWAAPIAMQIYKKHLDPRPGPCPPELGLGLGQLACCCLHRRAKRRPPMTQVYERLEKLQAVVAGVPGHLEAASCIPPSPQENSYVSSTGRAHSGAAPWQPLAAPSGASAQAAEQLQRGPNQPVESDESLGGLSAALRSWHLTPSCPLDPAPLREAGCPQGDTAGESSWGSGPGSRPTAVEGLALGSSASSSSEPPQIIINPARQKMVQKLALYEDGALDSLQLLSSSSLPGLGLEQDRQGPEESDEFQS

SEQ ID NO: 6334 - DNA, 4525 bp, Homo sapiens
gcgcggtgccgccgggaaagatggtcgtggcgctgcggtacgtgtggcctctcctcctctgcagcccctgcctgcttatccagatccccgaggaatatgaaggacaccatgtgatggagccacctgtcatcacggaacagtctccacggcgcctggttgtcttccccacagatgacatcagcctcaagtgtgaggccagtggcaagcccgaagtgcagttccgctggacgagggatggtgtccacttcaaacccaaggaagagctgggtgtgaccgtgtaccagtcgccccactctggctccttcaccatcacgggcaacaacagcaactttgctcagaggttccagggcatctaccgctgctttgccagcaataagctgggcaccgccatgtcccatgagatccggctcatggccgagggtgcccccaagtggccaaaggagacagtgaagcccgtggaggtggaggaaggggagtcagtggttctgccttgcaaccctcccccaagtgcagagcctctccggatctactggatgaacagcaagatcttgcacatcaagcaggacgagcgggtgacgatgggccagaacggcaacctctactttgccaatgtgctcacctccgacaaccactcagactacatctgccacgcccacttcccaggcaccaggaccatcattcagaaggaacccattgacctccgggtcaaggccaccaacagcatgattgacaggaagccgcgcctgctcttccccaccaactccagcagccacctggtggccttgcaggggcagccattggtcctggagtgcatcgccgagggctttcccacgcccaccatcaaatggctgcgccccagtggccccatgccagccgaccgtgtcacctaccagaaccacaacaagaccctgcagctgctgaaagtgggcgaggaggatgatggcgagtaccgctgcctggccgagaactcactgggcagtgcccggcatgcgtactatgtcaccgtggaggctgccccgtactggctgcacaagccccagagccatctatatgggccaggagagactgcccgcctggactgccaagtccagggcaggccccaaccagaggtcacctggagaatcaacgggatccctgtggaggagctggccaaagaccagaagtaccggattcagcgtggcgccctgatcctgagcaacgtgcagcccagtgacacaatggtgacccaatgtgaggcccgcaaccggcacgggctcttgctggccaatgcctacatctacgttgtccagctgccagccaagatcctgactgcggacaatcagacgtacatggctgtccagggcagcactgcctaccttctgtgcaaggccttcggagcgcctgtgcccagtgttcagtggctggacgaggatgggacaacagtgcttcaggacgaacgcttcttcccctatgccaatgggaccctgggcattcgagacctccaggccaatgacaccggacgctacttctgcctggctgccaatgaccaaaacaatgttaccatcatggctaacctgaaggttaaagatgcaactcagatcactcaggggccccgcagcacaatcgagaagaaaggttccagggtgaccttcacgtgccaggcctcctttgacccctccttgcagcccagcatcacctggcgtggggacggtcgagacctccaggagcttggggacagtgacaagtacttcatagaggatgggcgcctggtcatccacagcctggactacagcgaccagggcaactacagctgcgtggccagtaccgaactggatgtggtggagagtagggcacagctcttggtggtggggagccctgggccggtgccacggctggtgctgtccgacctgcacctgctgacgcagagccaggtgcgcgtgtcctggagtcctgcagaagaccacaatgcccccattgagaaatatgacattgaatttgaggacaaggaaatggcgcctgaaaaatggtacagtctgggcaaggttccagggaaccagacctctaccaccctcaagctgtcgccctatgtccactacacctttagggttactgccataaacaaatatggccccggggagcccagcccggtctctgagactgtggtcacacctgaggcagccccagagaagaaccctgtggatgtgaagggggaaggaaatgagaccaccaatatggtcatcacgtggaagccgctccggtggatggactggaacgccccccaggttcagtaccgcgtgcagtggcgccctcaggggacacgagggccctggcaggagcagattgtcagcgaccccttcctggtggtgtccaacacgtccaccttcgtgccctatgagatcaaagtccaggccgtcaacagccagggcaagggaccagagccccaggtcactatcggctactctggagaggactacccccaggcaatccctgagctggaaggcattgaaatcctcaactcaagtgccgtgctggtcaagtggcggccggtggacctggcccaggtcaagggccacctccgcggatacaatgtgacgtactggagggagggcagtcagaggaagcacagcaagagacatatccacaaagaccatgtggtggtgcccgccaacaccaccagtgtcatcctcagtggcttgcggccctatagctcctaccacctggaggtgcaggcctttaacgggcgaggatcggggcccgccagcgagttcaccttcagcaccccagagggagtgcctggccaccccgaggcgttgcacctggagtgccagtcgaacaccagcctgctgctgcgctggcagcccccactcagccacaacggcgtgctcaccggctacgtgctctcctaccaccccctggatgaggggggcaaggggcaactgtccttcaaccttcgggaccccgaacttcggacacacaacctgaccgatctcagcccccacctgcggtaccgcttccagcttcaggccaccaccaaagagggccctggtgaagccatcgtacgggaaggaggcactatggccttgtctgggatctcagattttggcaacatctcagccacagcgggtgaaaactacagtgtcgtctcctgggtccccaaggagggccagtgcaacttcaggttccatatcttgttcaaagccttgggagaagagaagggtggggcttccctttcgccacagtatgtcagctacaaccagagctcctacacgcagtgggacctgcagcctgacactgactacgagatccacttgtttaaggagaggatgttccggcaccaaatggctgtgaagaccaatggcacaggccgcgtgaggctccctcctgctggcttcgccactgagggctggttcatcggctttgtgagtgccatcatcctcctgctcctcgtcctgctcatcctctgcttcatcaagcgcagcaagggcggcaaatactcagtgaaggataaggaggacacccaggtggactctgaggcccgaccgatgaaagatgagaccttcggcgagtacaggtccctggagagtgacaacgaggagaaggcctttggcagcagccagccatcgctcaacggggacatcaagcccctgggcagtgacgacagcctggccgattatgggggcagcgtggatgttcagttcaacgaggatggttcgttcattggccagtacagtggcaagaaggagaaggaggcggcagggggcaatgacagctcaggggccacttcccccatcaaccctgccgtggccctagaatagtggagtccaggacaggagatgctgtgcccctggccttgggatccaggcccctccctctccagcaggcccatgggaggctggagttggggcagaggagaacttgctgcctcggatccccttcctaccacccggtccccactttattgccaaaacccagctgcaccccttcctgggcacacgctgctctgccccagcttgggcagatctcccacatgccaggggcctttgggtgctgttttgccagcccatttgggcagagaggctgtggtttgggggagaagaagtaggggtggcccgaaagggtctccgaaatgctgtctttcttgctccctgactgggggcagacatggtggggtctcctcaggaccagggttggcaccttccccctcccccagccactccccagccagcctggctgggactgggaacagaactcggtgtccccaccatctgctgtcttttctttgccatctctgctccaaccgggatgggagccgggcaaactggccgcgggggcaggggaggccatctggagagcccagagtccccccactcccagcatcgcactctggcagcaccgcctcttcccgccgcccagcccaccccatggccggctttcaggagctccatacacacgctgccttcggtacccaccacacaacatccaagtggcctccgtcactacctggctgcggggcgggcacacctcctcccactgcccactggccggc

SEQ ID NO: 6335 - protein, 1257 aa, Homo sapiens
MVVALRYVWPLLLCSPCLLIQIPEEYEGHHVMEPPVITEQSPRRLVVFPTDDISLKCEASGKPEVQFRWTRDGVHFKPKEELGVTVYQSPHSGSFTITGNNSNFAQRFQGIYRCFASNKLGTAMSHEIRLMAEGAPKWPKETVKPVEVEEGESVVLPCNPPPSAEPLRIYWMNSKILHIKQDERVTMGQNGNLYFANVLTSDNHSDYICHAHFPGTRTIIQKEPIDLRVKATNSMIDRKPRLLFPTNSSSHLVALQGQPLVLECIAEGFPTPTIKWLRPSGPMPADRVTYQNHNKTLQLLKVGEEDDGEYRCLAENSLGSARHAYYVTVEAAPYWLHKPQSHLYGPGETARLDCQVQGRPQPEVTWRINGIPVEELAKDQKYRIQRGALILSNVQPSDTMVTQCEARNRHGLLLANAYIYVVQLPAKILTADNQTYMAVQGSTAYLLCKAFGAPVPSVQWLDEDGTTVLQDERFFPYANGTLGIRDLQANDTGRYFCLAANDQNNVTIMANLKVKDATQITQGPRSTIEKKGSRVTFTCQASFDPSLQPSITWRGDGRDLQELGDSDKYFIEDGRLVIHSLDYSDQGNYSCVASTELDVVESRAQLLVVGSPGPVPRLVLSDLHLLTQSQVRVSWSPAEDHNAPIEKYDIEFEDKEMAPEKWYSLGKVPGNQTSTTLKLSPYVHYTFRVTAINKYGPGEPSPVSETVVTPEAAPEKNPVDVKGEGNETTNMVITWKPLRWMDWNAPQVQYRVQWRPQGTRGPWQEQIVSDPFLVVSNTSTFVPYEIKVQAVNSQGKGPEPQVTIGYSGEDYPQAIPELEGIEILNSSAVLVKWRPVDLAQVKGHLRGYNVTYWREGSQRKHSKRHIHKDHVVVPANTTSVILSGLRPYSSYHLEVQAFNGRGSGPASEFTFSTPEGVPGHPEALHLECQSNTSLLLRWQPPLSHNGVLTGYVLSYHPLDEGGKGQLSFNLRDPELRTHNLTDLSPHLRYRFQLQATTKEGPGEAIVREGGTMALSGISDFGNISATAGENYSVVSWVPKEGQCNFRFHILFKALGEEKGGASLSPQYVSYNQSSYTQWDLQPDTDYEIHLFKERMFRHQMAVKTNGTGRVRLPPAGFATEGWFIGFVSAIILLLLVLLILCFIKRSKGGKYSVKDKEDTQVDSEARPMKDETFGEYRSLESDNEEKAFGSSQPSLNGDIKPLGSDDSLADYGGSVDVQFNEDGSFIGQYSGKKEKEAAGGNDSSGATSPINPAVALE

SEQ ID NO: 6336 - DNA, 4513 bp, Homo sapiens
gcgcggtgccgccgggaaagatggtcgtggcgctgcggtacgtgtggcctctcctcctctgcagcccctgcctgcttatccagatccccgaggaatatgaaggacaccatgtgatggagccacctgtcatcacggaacagtctccacggcgcctggttgtcttccccacagatgacatcagcctcaagtgtgaggccagtggcaagcccgaagtgcagttccgctggacgagggatggtgtccacttcaaacccaaggaagagctgggtgtgaccgtgtaccagtcgccccactctggctccttcaccatcacgggcaacaacagcaactttgctcagaggttccagggcatctaccgctgctttgccagcaataagctgggcaccgccatgtcccatgagatccggctcatggccgagggtgcccccaagtggccaaaggagacagtgaagcccgtggaggtggaggaaggggagtcagtggttctgccttgcaaccctcccccaagtgcagagcctctccggatctactggatgaacagcaagatcttgcacatcaagcaggacgagcgggtgacgatgggccagaacggcaacctctactttgccaatgtgctcacctccgacaaccactcagactacatctgccacgcccacttcccaggcaccaggaccatcattcagaaggaacccattgacctccgggtcaaggccaccaacagcatgattgacaggaagccgcgcctgctcttccccaccaactccagcagccacctggtggccttgcaggggcagccattggtcctggagtgcatcgccgagggctttcccacgcccaccatcaaatggctgcgccccagtggccccatgccagccgaccgtgtcacctaccagaaccacaacaagaccctgcagctgctgaaagtgggcgaggaggatgatggcgagtaccgctgcctggccgagaactcactgggcagtgcccggcatgcgtactatgtcaccgtggaggctgccccgtactggctgcacaagccccagagccatctatatgggccaggagagactgcccgcctggactgccaagtccagggcaggccccaaccagaggtcacctggagaatcaacgggatccctgtggaggagctggccaaagaccagaagtaccggattcagcgtggcgccctgatcctgagcaacgtgcagcccagtgacacaatggtgacccaatgtgaggcccgcaaccggcacgggctcttgctggccaatgcctacatctacgttgtccagctgccagccaagatcctgactgcggacaatcagacgtacatggctgtccagggcagcactgcctaccttctgtgcaaggccttcggagcgcctgtgcccagtgttcagtggctggacgaggatgggacaacagtgcttcaggacgaacgcttcttcccctatgccaatgggaccctgggcattcgagacctccaggccaatgacaccggacgctacttctgcctggctgccaatgaccaaaacaatgttaccatcatggctaacctgaaggttaaagatgcaactcagatcactcaggggccccgcagcacaatcgagaagaaaggttccagggtgaccttcacgtgccaggcctcctttgacccctccttgcagcccagcatcacctggcgtggggacggtcgagacctccaggagcttggggacagtgacaagtacttcatagaggatgggcgcctggtcatccacagcctggactacagcgaccagggcaactacagctgcgtggccagtaccgaactggatgtggtggagagtagggcacagctcttggtggtggggagccctgggccggtgccacggctggtgctgtccgacctgcacctgctgacgcagagccaggtgcgcgtgtcctggagtcctgcagaagaccacaatgcccccattgagaaatatgacattgaatttgaggacaaggaaatggcgcctgaaaaatggtacagtctgggcaaggttccagggaaccagacctctaccaccctcaagctgtcgccctatgtccactacacctttagggttactgccataaacaaatatggccccggggagcccagcccggtctctgagactgtggtcacacctgaggcagccccagagaagaaccctgtggatgtgaagggggaaggaaatgagaccaccaatatggtcatcacgtggaagccgctccggtggatggactggaacgccccccaggttcagtaccgcgtgcagtggcgccctcaggggacacgagggccctggcaggagcagattgtcagcgaccccttcctggtggtgtccaacacgtccaccttcgtgccctatgagatcaaagtccaggccgtcaacagccagggcaagggaccagagccccaggtcactatcggctactctggagaggactacccccaggcaatccctgagctggaaggcattgaaatcctcaactcaagtgccgtgctggtcaagtggcggccggtggacctggcccaggtcaagggccacctccgcggatacaatgtgacgtactggagggagggcagtcagaggaagcacagcaagagacatatccacaaagaccatgtggtggtgcccgccaacaccaccagtgtcatcctcagtggcttgcggccctatagctcctaccacctggaggtgcaggcctttaacgggcgaggatcggggcccgccagcgagttcaccttcagcaccccagagggagtgcctggccaccccgaggcgttgcacctggagtgccagtcgaacaccagcctgctgctgcgctggcagcccccactcagccacaacggcgtgctcaccggctacgtgctctcctaccaccccctggatgaggggggcaaggggcaactgtccttcaaccttcgggaccccgaacttcggacacacaacctgaccgatctcagcccccacctgcggtaccgcttccagcttcaggccaccaccaaagagggccctggtgaagccatcgtacgggaaggaggcactatggccttgtctgggatctcagattttggcaacatctcagccacagcgggtgaaaactacagtgtcgtctcctgggtccccaaggagggccagtgcaacttcaggttccatatcttgttcaaagccttgggagaagagaagggtggggcttccctttcgccacagtatgtcagctacaaccagagctcctacacgcagtgggacctgcagcctgacactgactacgagatccacttgtttaaggagaggatgttccggcaccaaatggctgtgaagaccaatggcacaggccgcgtgaggctccctcctgctggcttcgccactgagggctggttcatcggctttgtgagtgccatcatcctcctgctcctcgtcctgctcatcctctgcttcatcaagcgcagcaagggcggcaaatactcagtgaaggataaggaggacacccaggtggactctgaggcccgaccgatgaaagatgagaccttcggcgagtacagtgacaacgaggagaaggcctttggcagcagccagccatcgctcaacggggacatcaagcccctgggcagtgacgacagcctggccgattatgggggcagcgtggatgttcagttcaacgaggatggttcgttcattggccagtacagtggcaagaaggagaaggaggcggcagggggcaatgacagctcaggggccacttcccccatcaaccctgccgtggccctagaatagtggagtccaggacaggagatgctgtgcccctggccttgggatccaggcccctccctctccagcaggcccatgggaggctggagttggggcagaggagaacttgctgcctcggatccccttcctaccacccggtccccactttattgccaaaacccagctgcaccccttcctgggcacacgctgctctgccccagcttgggcagatctcccacatgccaggggcctttgggtgctgttttgccagcccatttgggcagagaggctgtggtttgggggagaagaagtaggggtggcccgaaagggtctccgaaatgctgtctttcttgctccctgactgggggcagacatggtggggtctcctcaggaccagggttggcaccttccccctcccccagccactccccagccagcctggctgggactgggaacagaactcggtgtccccaccatctgctgtcttttctttgccatctctgctccaaccgggatgggagccgggcaaactggccgcgggggcaggggaggccatctggagagcccagagtccccccactcccagcatcgcactctggcagcaccgcctcttcccgccgcccagcccaccccatggccggctttcaggagctccatacacacgctgccttcggtacccaccacacaacatccaagtggcctccgtcactacctggctgcggggcgggcacacctcctcccactgcccactggccggc

SEQ ID NO: 6337 - protein, 1253 aa, Homo sapiens
MVVALRYVWPLLLCSPCLLIQIPEEYEGHHVMEPPVITEQSPRRLVVFPTDDISLKCEASGKPEVQFRWTRDGVHFKPKEELGVTVYQSPHSGSFTITGNNSNFAQRFQGIYRCFASNKLGTAMSHEIRLMAEGAPKWPKETVKPVEVEEGESVVLPCNPPPSAEPLRIYWMNSKILHIKQDERVTMGQNGNLYFANVLTSDNHSDYICHAHFPGTRTIIQKEPIDLRVKATNSMIDRKPRLLFPTNSSSHLVALQGQPLVLECIAEGFPTPTIKWLRPSGPMPADRVTYQNHNKTLQLLKVGEEDDGEYRCLAENSLGSARHAYYVTVEAAPYWLHKPQSHLYGPGETARLDCQVQGRPQPEVTWRINGIPVEELAKDQKYRIQRGALILSNVQPSDTMVTQCEARNRHGLLLANAYIYVVQLPAKILTADNQTYMAVQGSTAYLLCKAFGAPVPSVQWLDEDGTTVLQDERFFPYANGTLGIRDLQANDTGRYFCLAANDQNNVTIMANLKVKDATQITQGPRSTIEKKGSRVTFTCQASFDPSLQPSITWRGDGRDLQELGDSDKYFIEDGRLVIHSLDYSDQGNYSCVASTELDVVESRAQLLVVGSPGPVPRLVLSDLHLLTQSQVRVSWSPAEDHNAPIEKYDIEFEDKEMAPEKWYSLGKVPGNQTSTTLKLSPYVHYTFRVTAINKYGPGEPSPVSETVVTPEAAPEKNPVDVKGEGNETTNMVITWKPLRWMDWNAPQVQYRVQWRPQGTRGPWQEQIVSDPFLVVSNTSTFVPYEIKVQAVNSQGKGPEPQVTIGYSGEDYPQAIPELEGIEILNSSAVLVKWRPVDLAQVKGHLRGYNVTYWREGSQRKHSKRHIHKDHVVVPANTTSVILSGLRPYSSYHLEVQAFNGRGSGPASEFTFSTPEGVPGHPEALHLECQSNTSLLLRWQPPLSHNGVLTGYVLSYHPLDEGGKGQLSFNLRDPELRTHNLTDLSPHLRYRFQLQATTKEGPGEAIVREGGTMALSGISDFGNISATAGENYSVVSWVPKEGQCNFRFHILFKALGEEKGGASLSPQYVSYNQSSYTQWDLQPDTDYEIHLFKERMFRHQMAVKTNGTGRVRLPPAGFATEGWFIGFVSAIILLLLVLLILCFIKRSKGGKYSVKDKEDTQVDSEARPMKDETFGEYSDNEEKAFGSSQPSLNGDIKPLGSDDSLADYGGSVDVQFNEDGSFIGQYSGKKEKEAAGGNDSSGATSPINPAVALE

SEQ ID NO: 6338 - DNA, 642 bp, Homo sapiens
tcgtgttcatgggagctcgttttcttttcctctaggcagagaagaggcgatggcggcgatggcatctctcggcgccctggcgctgctcctgctgtccagcctctcccgctgctcagccgaggcctgcctggagccccagatcaccccttcctactacaccacttctgacgctgtcatttccactgagaccgtcttcattgtggagatctccctgacatgcaagaacagggtccagaacatggctctctatgctgacgtcggtggaaaacaattccctgtcactcgaggccaggatgtggggcgttatcaggtgtcctggagcctggaccacaagagcgcccacgcaggcacctatgaggttagattcttcgacgaggagtcctacagcctcctcaggaaggctcagaggaataacgaggacatttccatcatcccgcctctgtttacagtcagcgtggaccatcggggcacttggaacgggccctgggtgtccactgaggtgctggctgcggcgatcggccttgtgatctactacttggccttcagtgcgaagagccacatccaggcctgagggcggcaccccagccctgcccttgcttccttcaataaacatcacaggacctgggactgcacaggaaaaaa

SEQ ID NO: 6339 - protein, 173 aa, Homo sapiens
MAAMASLGALALLLLSSLSRCSAEACLEPQITPSYYTTSDAVISTETVFIVEISLTCKNRVQNMALYADVGGKQFPVTRGQDVGRYQVSWSLDHKSAHAGTYEVRFFDEESYSLLRKAQRNNEDISIIPPLFTVSVDHRGTWNGPWVSTEVLAAAIGLVIYYLAFSAKSHIQA

SEQ ID NO: 6340 - DNA, 1506 bp, Homo sapiens
gggcgggggtcgcggtccccccctcaacatggcggcagcggtgctctaggcgccggaagggggcgtgaatcggtgcgaccgcgcgcgtgcgcagtaccgggtccgcgcctgtccccgaaacttcgcaccccgtcgaactctcgcgagagcgtatctgcgtgtcgggacgtgcggaggctctcactttccgtcatggcgctgaaggtagcgaccgtcgccggcagcgccgcgaaggcggtgctcgggccagcccttctctgccgtccctgggaggttctaggcgcccacgaggtcccctcgaggaacatcttttcagaacaaacaattcctccgtccgctaagtatggcgggcggcacacggtgaccatgatcccaggggatggcatcgggccagagctcatgctgcatgtcaagtccgtcttcaggcacgcatgtgtaccagtggactttgaagaggtgcacgtgagttccaatgctgatgaagaggacattcgcaatgccatcatggccatccgccggaaccgcgtggccctgaagggcaacatcgaaaccaaccataacctgccaccgtcgcacaaatctcgaaacaacatccttcgcaccagcctggacctctatgccaacgtcatccactgtaagagccttccaggcgtggtgacccggcacaaggacatagacatcctcattgtccgggagaacacagagggcgagtacagcagcctggagcatgagagtgtggcgggagtggtggagagcctgaagatcatcaccaaggccaagtccctgcgcattgccgagtatgccttcaagctggcgcaggagagcgggcgcaagaaagtgacggccgtgcacaaggccaacatcatgaaactgggcgatgggcttttcctccagtgctgcagggaggtggcagcccgctaccctcagatcaccttcgagaacatgattgtggataacaccaccatgcagctggtgtcccggccccagcagtttgatgtcatggtgatgcccaatctctatggcaacatcgtcaacaatgtctgcgcgggactggtcgggggcccaggccttgtggctggggccaactatggccatgtgtacgcggtgtttgaaacagctacgaggaacaccggcaagagtatcgccaataagaacatcgccaaccccacggccaccctgctggccagctgcatgatgctggaccacctcaagctgcactcctatgccacctccatccgtaaggctgtcctggcatccatggacaatgagaatatgcacactccggacatcgggggccagggcacaacatctgaagccatccaggacgtcatccgccacatccgcgtcatcaacggccgggccgtggaggcctaggctggccctaggaccttcttggtttgctccttggattccccttcccactccagcaccccagccagcctggtacgcagatcccagaataaagcaccttctccctagaaaaaaaaaaaaaaaaaaaaaaaaaaa

SEQ ID NO: 6341 - protein, 393 aa, Homo sapiens
MALKVATVAGSAAKAVLGPALLCRPWEVLGAHEVPSRNIFSEQTIPPSAKYGGRHTVTMIPGDGIGPELMLHVKSVFRHACVPVDFEEVHVSSNADEEDIRNAIMAIRRNRVALKGNIETNHNLPPSHKSRNNILRTSLDLYANVIHCKSLPGVVTRHKDIDILIVRENTEGEYSSLEHESVAGVVESLKIITKAKSLRIAEYAFKLAQESGRKKVTAVHKANIMKLGDGLFLQCCREVAARYPQITFENMIVDNTTMQLVSRPQQFDVMVMPNLYGNIVNNVCAGLVGGPGLVAGANYGHVYAVFETATRNTGKSIANKNIANPTATLLASCMMLDHLKLHSYATSIRKAVLASMDNENMHTPDIGGQGTTSEAIQDVIRHIRVINGRAVEA

SEQ ID NO: 6342 - DNA, 3616 bp, Homo sapiens
gcggacggacgcgcctggtgccccggggaggggcgccaccgggggaggaggaggaggagaaggtggagaggaagagacgccccctctgcccgagacctctcaaggccctgacctcaggggccagggcactgacaggacaggagagccaagttcctccacttgggctgcccgaagaggccgcgaccctggagggccctgagcccaccgcaccaggggccccagcaccaccccgggggcctaaagcgacagtctcaggggccatcgcaaggtttccagttgcctagacaacaggcccagggtcagagcaacaatccttccagccacctgcctcaactgctgccccaggcaccagccccagtccctacgcggcagccagcccaggtgacatgccggtgctctccaggccccggccctggcgggggaacacgctgaagcgcacggccgtgctcctggccctcgcggcctatggagcccacaaagtctaccccttggtgcgccagtgcctggccccggccaggggtcttcaggcgcccgccggggagcccacgcaggaggcctccggggtcgcggcggccaaagctggcatgaaccgggtattcctgcagcggctcctgtggctcctgcggctgctgttcccccgggtcctgtgccgggagacggggctgctggccctgcactcggccgccttggtgagccgcaccttcctgtcggtgtatgtggcccgcctggacggaaggctggcccgctgcatcgtccgcaaggacccgcgggcttttggctggcagctgctgcagtggctcctcatcgccctccctgctaccttcgtcaacagtgccatccgttacctggagggccaactggccctgtcgttccgcagccgtctggtggcccacgcctaccgcctctacttctcccagcagacctactaccgggtcagcaacatggacgggcggcttcgcaaccctgaccagtctctgacggaggacgtggtggcctttgcggcctctgtggcccacctctactccaacctgaccaagccactcctggacgtggctgtgacttcctacaccctgcttcgggcggcccgctcccgtggagccggcacagcctggccctcggccatcgccggcctcgtggtgttcctcacggccaacgtgctgcgggccttctcgcccaagttcggggagctggtggcagaggaggcgcggcggaagggggagctgcgctacatgcactcgcgtgtggtggccaactcggaggagatcgccttctatgggggccatgaggtggagctggccctgctacagcgctcctaccaggacctggcctcgcagatcaacctcatccttctggaacgcctgtggtatgttatgctggagcagttcctcatgaagtatgtgtggagcgcctcgggcctgctcatggtggctgtccccatcatcactgccactggctactcagagtcagatgcagaggccgtgaagaaggcagccttggaaaagaaggaggaggagctggtgagcgagcgcacagaagccttcactattgcccgcaacctcctgacagcggctgcagatgccattgagcggatcatgtcgtcgtacaaggaggtgacggagctggctggctacacagcccgggtgcacgagatgttccaggtatttgaagatgttcagcgctgtcacttcaagaggcccagggagctagaggacgctcaggcggggtctgggaccataggccggtctggtgtccgtgtggagggccccctgaagatccgaggccaggtggtggatgtggaacaggggatcatctgcgagaacatccccatcgtcacgccctcaggagaggtggtggtggccagcctcaacatcagggtggaggaaggcatgcatctgctcatcacaggccccaatggctgcggcaagagctccctgttccggatcctgggtgggctctggcccacgtacggtggtgtgctctacaagcccccaccccagcgcatgttctacatcccgcagaggccctacatgtctgtgggctccctgcgtgaccaggtgatctacccggactcagtggaggacatgcaaaggaagggctactcggagcaggacctggaagccatcctggacgtcgtgcacctgcaccacatcctgcagcgggagggaggttgggaggctatgtgtgactggaaggacgtcctgtcgggtggcgagaagcagagaatcggcatggcccgcatgttctaccacaggcccaagtacgccctcctggatgaatgcaccagcgccgtgagcatcgacgtggaaggcaagatcttccaggcggccaaggacgcgggcattgccctgctctccatcacccaccggccctccctgtggaaataccacacacacttgctacagttcgatggggagggcggctggaagttcgagaagctggactcagctgcccgcctgagcctgacggaggagaagcagcggctggagcagcagctggcgggcattcccaagatgcagcggcgcctccaggagctctgccagatcctgggcgaggccgtggccccagcgcatgtgccggcacctagcccgcaaggccctggtggcctccagggtgcctccacctgacacaaccgtccccggcccctgccccgcccccaagctcggatcacatgaaggagacagcagcacccacccatgcacgcaccccgcccctgcatgcctggcccctcctcctagaaaacccttcccgccctcgggaaagtagatgtggagggtggcgccctgcgtaaccctcgccctgtccctcccactccctgggggcgctgttccacagtgactgggccctgtccagggcagtgagtcctctactttgctccgcggaggaagctggggtacaaggggcccagtgctggccacacagcagcgcagccgagccccaggagcccgtcaggccacagcccctggcactgcaggtggcctccctccagagactcgagtccccatgattccctcctcgtcagtctctcaaagaccccatggtccatcccctgagggtggtcagccaaggctcccgttccgtgggatgccataaaagccgcccagtgggacccacagtcacacagagcgcctcacctgcatcctctcccccacaagagccccaaagatcccacgggagaggggagagggacgcacagcactgcctgccaagcgagaatgcaggccccgccccctcggcccctcaccacctctttctacagcctaatttattggattccctattcgtagccatctccgtggccaatgtgactaccgtgccagcagcgggggcggcccagcctctgagtcccgtggggccccggctcccaccggtgccaaacccagcccctgcggccgtcaccccgccagcctacactgccagccgccaccggggcacacgggcctctgcttgccagccaggagtgcggacaccatgttcccagctcagtgccaaagaggggtcaccagggggagctgtctgcggagccagcgcctgcccgagagagaccccaccgccaccgtgtgcctttcccgggccctcagccctcgggccgggcaccacccccagtccccccagtaaa

SEQ ID NO: 6343 - protein, 745 aa, Homo sapiens [sequence omitted]

SEQ ID NO: 6344 - DNA, 1314 bp, Homo sapiens
tttccggccgcggtatgaggggcggggccggggctgctgtgggagagttcggttgctgcggcggggcctgcacgttgactgtgggaaactcggaaacaagctcacatcttcctgtgggaaaccttctagcaacaggatgagtctgcagtggactgcagttgccaccttcctctatgcggaggtctttgttgtgttgcttctctgcattcccttcatttctcctaaaagatggcagaagattttcaagtcccggctggtggagttgttagtgtcctatggcaacaccttctttgtggttctcattgtcatccttgtgctgttggtcatcgatgccgtgcgcgaaattcggaagtatgatgatgtgacggaaaaggtgaacctccagaacaatcccggggccatggagcacttccacatgaagcttttccgtgcccagaggaatctctacattgctggcttttccttgctgctgtccttcctgcttagacgcctggtgactctcatttcgcagcaggccacgctgctggcctccaatgaagcctttaaaaagcaggcggagagtgctagtgaggcggccaagaagtacatggaggagaatgaccagctcaagaagggagctgctgttgacggaggcaagttggatgtcgggaatgctgaggtgaagttggaggaagagaacaggagcctgaaggctgacctgcagaagctaaaggacgagctggccagcactaagcaaaaactagagaaagctgaaaaccaggttctggccatgcggaagcagtctgagggcctcaccaaggagtacgaccgcttgctggaggagcacgcaaagctgcaggctgcagtagatggtcccatggacaagaaggaagagtaagggcctccttcctcccctgcctgcagctggcttccacctggcacgtgcctgctgcttcctgagagcccggcctctccctccagtacttctgtttgtgcccttctgcttcccccattcccttccacagctcatagctcgtcatctcggcccttgtccacactctccaagcacattacaggggacctgattgctacacgttcagaatgcgtttgctgtcatcctgcttggcctggccaggcctggcacagccttggcttccacgcctgagcgtggagagcacgagttagttgtagtccggcttgcggtggggctgacttcctgttggtttgagcccctttttgttttgccctctgggtgttttctttggtcccgcaggagggtgggtggaacaggtggactggagtttctcttgagggcaataaaagttttcatggtgg

SEQ ID NO: 6345 - protein, 246 aa, Homo sapiens
MSLQWTAVATFLYAEVFVVLLLCIPFISPKRWQKIFKSRLVELLVSYGNTFFVVLIVILVLLVIDAVREIRKYDDVTEKVNLQNNPGAMEHFHMKLFRAQRNLYIAGFSLLLSFLLRRLVTLISQQATLLASNEAFKKQAESASEAAKKYMEENDQLKKGAAVDGGKLDVGNAEVKLEEENRSLKADLQKLKDELASTKQKLEKAENQVLAMRKQSEGLTKEYDRLLEEHAKLQAAVDGPMDKKEE

SEQ ID NO: 6346 - DNA, 1008 bp, Homo sapiens
gcttctgcgcgccggggccgcctctccttccgccggtgccgcggcgcctcatggaagccccggaggcggcggaggggggcctgcagcgcggggcccggagggcagccggcgcccgaagccagggtgcacttccgagtggcgaggttcatcatggaggcaggtgtcaagctagggatgcggtccattcccattgccactgcttgcaccatttaccataagttcttttgcgagaccaacctggacgcctatgacccttacctgattgccatgtcttcaatttacttggccggcaaagtggaagagcagcacctgcggactcgtgacatcatcaatgtgtccaacaggtactttaacccaagcggtgagcccctggaattggactcccgcttctgggaactccgggacagcatcgtgcagtgtgagcttctcatgctgagagttctgcgcttccaggtctccttccagcatccacacaagtacctgctccactacctggtttccctccagaactggctgaaccgccacagctggcagcggacccctgttgccgtcaccgcctgggccctgctgcgggacagctaccatggggcgctgtgcctccgcttccaggcccagcacatcgccgtggcggtgctctacctggccctgcaggtctacggagttgaggtgcccgccgaggtcgaggctgagaagccgtggtggcaggtgtttaatgacgaccttaccaagccaatcattgataatattgtgtctgatctcattcagatttataccatggacacagagatcccctaaggtcctggcccaggcctgcccaaagagaagccacatctgcgtttgtcctttgagaggactttgactacaatacaggcatgacatcaatgaaaggaaagtcatgaaatcgatgagactgaatccctacggatttcttaaaagccagatttgtagggagaatgaatgtgcaacgtggctgaaatctattttgtgtaataaaaggtgatacaagtc

SEQ ID NO: 6347 - protein, 214 aa, Homo sapiens
MEAGVKLGMRSIPIATACTIYHKFFCETNLDAYDPYLIAMSSIYLAGKVEEQHLRTRDIINVSNRYFNPSGEPLELDSRFWELRDSIVQCELLMLRVLRFQVSFQHPHKYLLHYLVSLQNWLNRHSWQRTPVAVTAWALLRDSYHGALCLRFQAQHIAVAVLYLALQVYGVEVPAEVEAEKPWWQVFNDDLTKPIIDNIVSDLIQIYTMDTEIP

SEQ ID NO: 6348 - DNA, 2348 bp, Homo sapiens
tctctccacaaactgcccaggagtgagtagctgctttcggtccgccggacacaccggacagatagacgtgcggacggcccaccaccccagcccgccaactagtcagcctgcgcctggcgcctcccctctccaggtccatccgccatgtggcccctgtggcgcctcgtgtctctgctggccctgagccaggccctgccctttgagcagagaggcttctgggacttcaccctggacgatgggccattcatgatgaacgatgaggaagcttcgggcgctgacacctcgggcgtcctggacccggactctgtcacacccacctacagcgccatgtgtcctttcggctgccactgccacctgcgggtggttcagtgctccgacctgggtctgaagtctgtgcccaaagagatctcccctgacaccacgctgctggacctgcagaacaacgacatctccgagctccgcaaggatgacttcaagggtctccagcacctctacgccctcgtcctggtgaacaacaagatctccaagatccatgagaaggccttcagcccactgcggaagctgcagaagctctacatctccaagaaccacctggtggagatcccgcccaacctacccagctccctggtggagctccgcatccacgacaaccgcatccgcaaggtgcccaagggagtgttcagtgggctccggaacatgaactgcatcgagatgggcgggaacccactggagaacagtggctttgaacctggagccttcgatggcctgaagctcaactacctgcgcatctcagaggccaagctgactggcatccccaaagacctccctgagaccctgaatgaactccacctagaccacaacaaaatccaggccatcgaactggaggacctgcttcgctactccaagctgtacaggctgggcctaggccacaaccagatcaggatgatcgagaacgggagcctgagcttcctgcccaccctccgggagctccacttggacaacaacaagttggccagggtgccctcagggctcccagacctcaagctcctccaggtggtctatctgcactccaacaacatcaccaaagtgggtgtcaacgacttctgtcccatgggcttcggggtgaagcgggcctactacaacggcatcagcctcttcaacaaccccgtgccctactgggaggtgcagccggccactttccgctgcgtcactgaccgcctggccatccagtttggcaactacaaaaagtagaggcagctgcagccaccgcggggcctcagtgggggtctctggggaacacagccagacatcctgatggggaggcagagccaggaagctaagccagggcccagctgcgtccaacccagccccccacctcgggtccctgaccccagctcgatgccccatcaccgcctctccctggctcccaagggtgcaggtgggcgcaaggcccggcccccatcacatgttcccttggcctcagagctgcccctgctctccctccacagccacccagaggcaccccatgaagcttttttctcgttcactcccaaacccaagtgtccaagtctccagtcctaggagaacagtccctgggtcagcagccaggaggcggtccataagaatggggacagtgggctctgccagggctgccgcacctgtccagacacacatgttctgttcctcctcctcatgcatttccagcctttcaaccctccccgactctgcggctcccctcagcccccttgcaagttcatggcctgtccctcccagacccctgctccactggcccttcgaccagtcctcccttctgttctctctttccccgtccttcctctctctctctctctctctttctgtgtgtgtgtgtgtgtgtgtgtgtgtgtgtgtgtgtgtgtgtgtgtgtgtcttgtgcttcctcagacctttctcgcttctgagcttggtggcctgttccctccatctctccgaacctggcttcgcctgtccctttcactccacaccctctggccttctgccttgagctgggactgctttctgtctgtccggcctgcacccagcccctgcccacaaaaccccagggacagcggtctccccagcctgccctgctcaggccttgcccccaaacctgtactgtcccggaggaggttgggaggtggaggcccagcatcccgcgcagatgacaccatcaaccgccagagtcccagacaccggttttcctagaagcccctcacccccactggcccactggtggctaggtctccccttatccttctggtccagcgcaaggaggggctgcttctgaggtcggtggctgtctttccattaaagaaacaccgtgcaacgtg

SEQ ID NO: 6349 - DNA, 484 bp, Homo sapiens
tttagggagaagaaagcaacccttaaaatagaggaaaatgaagctgcttggattaccctgttgaagttcatctctgcctgtgccatgcatgaaaaaatactggcaaagtcttcacttacatgagtgttagactccatgttcccagtgggtctcggggttcagaactgagtgctctcatccaagcaataggagcgtcgacctcaggaaagcccaagtgttttgtgtgtattttgaggagtgggttatctgttgcactgagcctctctgtgtattttcttcttcttttcagcagaacaaggggaggtggacatggagagccaccggaatgccaacgcagagccagctgttcagcgtactcttttagagaaatagaagattgtcggcagaaacagcccaggcgttggcagcagggttagaacagctgcctgaggctcctccctgaaggacacctgcctgagagcagagatggaggccttctgttcac

SEQ ID NO: 6350 - DNA, 861 bp, Homo sapiens
cagagtttcgccatggcccggggccccaagaagcacttaaagcgtgttgcagcgccgaagcattggatgcttgacaaactaacgggtgtatttgcacctcgtccatcgacaggtccccacaagctgagggaatgtcttcctctgatcgtcttcctcaggaatagactcaagtatgcgttgactggagatgaggtaaagaagatatgtatgcaacgtttcatcaaaattgatggcaaggttcgagtggatgtcacataccctgctggattcatggatgtcatcagcatcgagaagacaggtgaacatttccgcctggtctatgacaccaagggccgttttgctgttcaccgcatcacagtggaagaggcaaagtacaagttgtgcaaagtgaggaagattactgtgggagtgaagggaatccctcacctggtgactcatgatgctcgaaccatccgctacccagatcctgtcatcaaggtgaacgatactgtgcagattgatttagggactggcaagataatcaactttatcaaatttgatacaggcaatttgtgtatggtgattggtggagccaacctcggtcgtgttggtgtgatcaccaacagggaaagacatcctggttcttttgatgtggtgcatgtgaaggatgccaatggcaacagctttgccacgaggctttccaacatttttgtcattggcaatggcaataaaccttggatttccctgcccaggggaaagggcattcgacttactgttgctgaagagagagataagaggctggccaccaaacagagcagtggctaaattgcagtagcagcatatctttttttctttgcacaaataaacagtgaattctcgttt

SEQ ID NO: 6351 - DNA, 1376 bp, Homo sapiens
ctagtttctcaggatcatgtctgtgagccaggattcctgatccagagacaatggccccgatgggatggagcccgaatgcgtcattgagagtaactggaatgagattgttgacagctttgatgacatgaacctctcggagtcccttctccgtgacatctatgcctatggttttgagaagccctctgccatccagcagcaagccattctaccttgtatcaggggttataatgtaatcgctcaagcccgatctgggactgggaaaatggccacatttgccatatcgattctgcagcagattgaattagatctaaaagccacccaggccttggtcctagcacccactcgagaattggctcagcagatacagaaggtggtcatggcactagtagactacatgggtgcctcctgtcatgcctgtgtcaggggcaccaatatgcgtgctgaggtgcagaaactgcagatggaagctccccacatcatcgtgggtacccctagccgtgtgtttgatatgcttaaccagagatacctgtctcccaaatacatcaagatgtttgtactggataaagctgatgaaatgttaagccgtggattcaaggaccagatctatgacatattccaaaagctcaacagcaacacccaggtagttttgctgtcagctacaatgccttctgatatgcttgaggtgatcaagaagttcatgagggaccccattcggattcttgtcaagaaggaagagttgaccctggagggcatccgccaattctacatcaacgtggaacaagaggagtggaagctggacacactatgtgacttgtatgaaaccctgaccatcacccaggaagtcatcttcatcaacacccggaggaaggtggactggctcactgagaagatgcatgctcgagatttcactgtctccgccatgcatggagatatggaccaaaaggagcaagacgtgatcatgagggagtttcattctggctctagcagagttttgattacaactgacctgctggccagaggcattgatgtgcagcaggtttctttagtcatcaactatgaccttcccaccaacagggaaaactatatccacagaatcagtcgaggtggacggtttggccgtaaaggtgtggctattaacatggtgacagaagaagacaagaggactcttcaagacattgagatcttctacaacacctccattgaggaaatgcccccaatgttgctgacctcatctgaggggctgtcctgccgcccagccccagccagggctcaatctcgggggtgctgaggagcagcaggagaggggagtgaagggagccaagggatagacttgtcattttttttctttgaataaatgtcactttttgaggccaaaa

SEQ ID NO: 6352 - DNA, 2653 bp, Homo sapiens
acttctgttccaaaggctgggaagaactaagctgccccagctcctcccatttcttgggcagggctctttcctgttgtgtgttcctccagggcctgtcctgtaccgagctctgtctgttccagccttcatccttcctggctgttgcttttcctcttaagggccttagaactcttgctcttcctgggctgtgggggaatgagtgttcttgccatttgccagcctaatgcgcatggtttctgcccctgataacaggagtgagtgagcccctcagacctgcactctgggtgtctcctgctttcaaaggttcttaatagtgaatgctttaaaattaaagtcatcacaaaatggaagttttcccagggtggaaaacaagaggaagtgctgctgtaattgggagcacaaggggcctcccaaaaaggagccccacctcagcatcactgccttatttgtggcctccgtggggtgagtggggttctctcctccctccctccctcctcctggggtgggagggcgctcctattcccatctttgtgttccctggaggcaggtatcacaaaacatttgtgaattgctttaggtgcagggacaccacccactcaggacttttccccatcatcccttccattgccacaccctagatccagcctcaggaactaataagttttgagaaaagcaggcggtagagcagcagcttggtgctctcagcggtggctggctggcatttttctctagcattgtggtgccaccttccctccttgtcccaaggttataaggccttgtctttctctttggaatcataaagtggaacagagtccccagaactcgtgtggccatttccgccagcatcactccccggtgcctgtggggtcccggtgtacctaatgggagaacgatcccatgtgctagccagaaatataccgtctcttgaaggaaagcaggagctcagacttttagagccagctgtggcttcggacccaaggcctgacctaggctgctatcctaatattgcagaaggggcctctcttccaagccccaccctaagggttagcccttggccaaatcttttgccatctggtcccagctaggcttttctgactaaataagcaataagagggtctaagctgactgagttgcaaggaccctttccaccctcccttggatctccatgtttttccagatggaggaagagcatgtgccaccccctgtcctaacaggcttgtccaagtgcttggtgtgggacccaagaccaaagcccaggatggcttggtgggagtgtccctgctgcatctgcatgaagcccctgctttctaggcctcactcccatcagaaccctgcctgcccacctgcaactcccccacagcaatgccattcccacttgccccagagaagctactcagccaaacctagccagggtctgttcatgtagaccagagccagcctagtcattatttgctgtcgggtttccagtttcactgtgtgttagggcgagggatgattgtaaaatttgctcctcaaaggaatcaggccagactcaattttggagggcaagacagggaggaggccgcttcatcccagactctcttctagggcttcccaccatcagcccctcccacttgagactggtcttcaggaggcaataggccaccatgcctggtcagcatcaattcaagccatgccaggaatctgcctacctgccaggttcagttcctttaaggtgcctcttaagggacacactgtgtctctctgattgggcttctaaatcaaaagcctgatgttcgtgtccctctcatagggggagctttggatacaggaccagtttggaaaagggtcaggtaagggtttccactctgcacattgtagaggggacgctcggtagcccatgggtcccttactaaagaggttgagtgaatttgccttcagttaacctgggaccttctgtttagcttccttctgcttcccaaagattttaagcattttgtaaatgtataaactcacctctggcaacagtggcccagatgctgctttgtgctatgtaaaggcagtctttccctgggaaatggatgctattctattctgctgcccctacctgttcctgaggcttcatttagaaagaaaataccctcagaaggctgtctggcacccagtgtcctagccaggccaaatatatgagaaaggtaagtccattttccccttcaggtcctcagtggatgacttaaccactgctgtcccttggtccctttttcctaaacaggggtttagttctgtctttttatccttttttctaaatgctggtaaatatctacattcagccaggaagaggaggccagaggtcgggccagctgccccattcttttaacgttgtagggcctgcccctggagtggaccttcctctttgggcctcgtcagcttttttgcttatcatattccattttgtgccactttcccccttcaagatgccatttggagggtaggggatctgctttccactgtgagtgggctatgagattctgactaccttgcttacagattcatggtttgataaatttgttgcattcaaaaacttgtaatgcaggacgccattaagtgtctgtttaaatttttggattatttatattacttacaattaattaataaaagtgggtttaaaaaacct

SEQ ID NO: 6353 - DNA, 913 bp, Homo sapiens
aacctactacgtgcggcggcagctggggcgggaaggcgggagctgggggcgctgggggcgctgcggccgctgcggccgctgcagccgctgcagcgccagggtccacctggtcggctgcacctgtggaggaggaggtggatttcaggcttcccgtagactggaagaatcggctcaaaaccgcttgcctcgcaggggctgagctggaggcagcgaggccgcccgacgcaggcttccggcgagacatggcagggcaaggatggcagcccggcggcagggcctggcgaggagcgcgagcccgcggccgcagttcccaggcgtctgcgggcgcgagcacgccgcgaccctgcgtgcgccggggcgggggggcggggcctcgcctgcacaaatggggacgaggggggcggggcggccacaatttcgcgccaaacttgaccgcgcgttctgctgtaacgagcgggctcggaggtcctcccgctgctgtcatggttggttcgctaaactgcatcgtcgctgtgtcccagaacatgggcatcggcaagaacggggacctgccctggccaccgctcaggaatgaattcagatatttccagagaatgaccacaacctcttcagtagaaggtaaacagaatctggtgattatgggtaagaagacctggttctccattcctgagaagaatcgacctttaaagggtagaattaatttagttctcagcagagaactcaaggaacctccacaaggagctcattttctttccagaagtctagatgatgcctttggtggcagttctgtttataaggaagccatgaatcacccaggccatcttaaactatttgtgacaaggatcatgcaagactttgaaagtgacacgttttttccagaaattgatttggagaaatataaacttctgccaga

SEQ ID NO: 6354 - DNA, 961 bp, Homo sapiens
tagagcagacaagcccgccccgccgctcctcccagcagcttctatcccggaagttgatgccgagcgcagatcgcttgcagcttgctagctgtgtgggctgggaggtctggtagggctgagcttgcaagaggatcaacatgcctttggctagagatttactacatccgtccttggaagaggaaaagaaaaaacataaaaagaaacgcctagtacaaagtccaaattcttactttatggatgtaaaatgtccaggttgctacaagatcaccacggttttcagccatgctcagacagtggttctttgtgtaggttgttcaacagtgttgtgccagcctacaggaggaaaggccagactcacagaaggtatatcatttggcattctccaacccagtgatgagattgatgattataaatgtctctatcttcactgaaaagtttaaagaaatcttaatgattaccaaaataacttatctttcattgtgtgctttcagtaaagaatggcctgttcaaatggatatatttatactcttgaccttgcagtgaactccattgacttatttttcttagtttagaacacatttattcacttagtttgcttaacttggaataaattaagtcagaatagaagcaaaagaataactacatgttataggacatgcagatttatttatttatttatttattattttttttttttattaggagtctcgctctgtcacccaggctggagtgcagtggcgccatctcagctcactgcaacttctgcctccccggttcaagtgattctcttgcctctgcctcccaagtagctgggaccacaggcgcgtgccaccatgcctggctaattttttgtatttttagtagaggtggggtttcactgtgttagccaggatggtcttgatctcctgacctcatggtctgcccacctcagcctcccaaagtgctgggattataggcatga

SEQ ID NO: 6355 - DNA, 4479 bp, Homo sapiens
cacaaccgtgacagactgccattcctgagtctcttctggccatgggcccccggagccgtgagcgtcgggcaggcgcggtacagaacaccaacgacagcagcgccctcagcaagcgttccctggccgcgcgcgggtacgtgcaggacccctttgccgcgttgctggttccgggcgcggcgcgccgcgcaccgctcattcaccgaggctactacgtccgcgcacgcgccgtgaggcactgcgtgcgcgcttttttggagcagattggcgcgccccaggccgcgcttcgcgcgcagatcttgtctctcggcgctggcttcgactcgctctattttcgcttaaaaaccgcgggccgcctggcccgggctgcagtctgggaggtggattttccggacgtggcgcggcgcaaagcagaaaggattggagagacgccagagctgtgcgcgttaaccgggcctttcgagaggggggagcccgcgtccgcgctgtgctttgagagcgcagactactgcatcctgggtctggacttgcggcagctccagcgagtggaggaggccctgggcgccgcggggctcgacgcagcctcacccactctgctcctggccgaggcggtgctgacctacctcgagccggagagtgccgcggccctcatcgcctgggcagcccagcgttttcctaatgcccttttcgtggtctatgagcagatgaggcctcaagacgcctttggccagttcatgctgcaacattttcggcagctaaactcccccctgcatggcctggagcgttttcctgacgtggaggcgcagcggcgccgcttccttcaagctggctggaccgcctgcggtgccgtggacatgaatgaattctatcactgctttcttcccgcagaagaacgccggcgggtggaaaatattgaaccctttgacgaatttgaggagtggcatctgaagtgcgcccattatttcattctggcagcttctaggggagacaccctctcccacaccctagtgtttccatcctcagaggcatttcctcgcgtaaatcctgcttcgccttcaggggtattccctgccagcgtagtcagtagcgagggccaggtcccaaacctgaagagatatggccacgcctctgtcttcttgagcccagacgttattctcagtgcaggaggatttggagagcaggaggggcggcactgccgagtgagccagtttcacttgctctcaagagattgtgactctgaatggaaaggcagccaaataggcagttgtgggactggagttcagtgggatggacgcctttatcacaccatgacaagactctcagagagtcgggttctggttctgggagggagactgtccccagtaagtccagccttgggggttctccagcttcatttttttaagagtgaggataataacactgaggacctgaaagtgacaataacaaaggctggccgaaaggatgattccactttgtgttgttggcggcattcaacaacagaagtgtcctgtcagaatcaggaatatttgtttgtgtatgggggtcgaagcgtggtggaacctgtactaagtgactggcatttcctccatgtagggacaatggcttgggtcaggatcccagtggagggagaagtacctgaagcccggcattctcacagtgcctgcacttggcaagggggagcccttattgctggaggtctcggggcttctgaggagccattgaactctgtgctctttctgagaccaatctcttgtggattcctctgggagtcagtagacatccagcctcccattaccccaaggtactcccacacagctcatgtgctcaatggaaagctgttactggttggagggatctggattcattcctcctcatttcctggagtgactgtgatcaatttgactacaggattgagctctgagtatcagattgacacaacatatgtgccatggccattaatgttacacaaccatactagtatccttcttcctgaagagcaacagctcctgctccttggaggtggtgggaactgcttttcctttggtacctacttcaacccccatacagtcacattagacctttcttccttaagtgctgggcagtaaggactggactaatattcaggacccactaaagtagacaataaagttttccacaaataggatgaccctctagctatagatactgccactcctcctttccccatcctttttttcccttagcactattcagtgcaaaaagtgaaaaaggttggtaaaataggtaaaatacctagaaacaatcactacagaaaacagctgaagacagtggccatgcagtccgagaggagtagtggtctgcctctaattttctaatctaagttcgtttattgagttacagtggtctttagtaaagtaaaacaatttcccaatcccaggccttgtgatttgagatggtaccttagaaaaagttacacgcagttccgtggttgaatatatttgagatggtaccttagaaaaagtttcacgcagatccttggttgaatatagttgagggagcgtagtattgacaattcttcatgtaggaaacctgaaatgaacacagtcacagtttgattaaaacattgtcctgtttgttgcaacagaaaactcggatagttttaacaacaggaaacacttgtaggacttcctttaccaacatactttttaaatgttttgctattggttccatatttatttagatttataagtgtcaataaagcaaacttttgatgcctcaattcattttgcacggggtataataatgttttgttccagatatactctccacctttcactgttctgtgctccaagaggctgacctttatgggctgcatcaaggagctctctttactttttggttgagttccaccagtcagaggcaccagaggggaatgggggcaaaaagaagagtgagagtgagttggtatttattcccaattcttcccctgttggtttgcaagttggcagtggcagcattcttctgtcaaaggctacagctcctgccgtgtaatcctttcctgaagacagagttctaattctgcatcatcccaggtttcagtaattgttcctttacttcaccttttcaggcctaggagttgtgatggctctttgctagacctgaactgtactgtccaatgtggtagctattgacaacatgtgactatttaaacgaattaataaattcagtggcttagtcacattgaccacattttaagtgcttaataactatgtgtggctttggctactgtattagacaatgtagatgtagaacatttcatcgttacagaaatttctactggacactgctgactggatatcttgacttggtttcccttaaccctactcagccccttatagttagcatcccattaaactcaattatcccttttatatgggaatctgttgcctagtgagccatgtgagatcaatgaaatagctattcatccttaaaatttgagccttaatttgtcatctaaattatgcataccttgtgaaatatacacctcaaaaaatgtagtggctttggtggtaataagtgtattactttagtatttcttcttagtcctagaaaccttagtagttttcattctacaagtgcctaaatgattattatgaaccatcattgatgacaaattgcatcctttatttctattaattttgcatataaatggatgtgaaaggtgattaatataaaaaccaagtagcaaacacaaacctaagtgtatggagaggacagtcttggctctgttagatgaagcctccccgggggagaccagctgaatgagggttgtggtataggctgggcatggtggctcacgcctataattccagcactttgggaggccaagacagaaggatcacttaaagccaggagtttaagaccagcccaggcaacaaagtcagatccccatctctacaaaaaaataagtaggcacggtggtgtgtgcttgtagtcttggatactctggaggctgaggtgatagtgagctgtgattgtgccactgcactcctgcctggttgacagagtgagaccccgtctcttaaaaagaaaaaaaaaaaaggttgttgtccaacttcagctttcctgatactttgtaagagccatttctagggaaagcattggttatggctatgactgagtcctgggaaacagggcttattacagctgggaagacatctggcaaggcgatcagtgggccaggtagtagaaaactggcagggaatatgatcagcaggagaaaatggctgttctgtatttcctgtttctaagtttactacagcacaccccagctttcaggagcagataaaagcagaacactgtgatgaggccaggcgcagtggcacatgccttgatcccagcactttgggaggccaaggctggcagatcacttgaactcaggagttggagaccagcctggccaatatggtgaaactccgtctctccccaaaaaaaaaaaaaaaa
